(19) United States
(12) Patent Application Publication
(10) Pub. No.: US 2018/0112213 A1
(43) Pub. Date: Apr. 26, 2018

(54) CRISPR/CAS-RELATED METHODS, COMPOSITIONS AND COMPONENTS

(71) Applicant: Editas Medicine, Inc., Cambridge, MA (US)

(72) Inventors: Gordon Grant Welstead, Cambridge, MA (US); Jennifer Leah Gori, Jamaica Plain, MA (US); Jack Michael Heath, Boston, MA (US); David A. Bumcrot, Belmont, MA (US)

(73) Assignees: Editas Medicine, Inc., Cambridge, MA (US); Editas Medicine, Inc., Cambridge, MA (US)

(21) Appl. No.: 15/560,968

(22) PCT Filed: Mar. 25, 2016
(86) PCT No.: PCT/US2016/024353

§ 371 Date: Sep. 22, 2017

Related U.S. Application Data
(60) Provisional application No. 62/244,572, filed on Oct. 21, 2015.
(60) Provisional application No. 62/220,815, filed on Sep. 18, 2015.
(60) Provisional application No. 62/210,392, filed on Aug. 26, 2015.
(60) Provisional application No. 62/184,103, filed on Jun. 24, 2015.
(60) Provisional application No. 62/159,932, filed on May 11, 2015.
(60) Provisional application No. 62/141,810, filed on Apr. 1, 2015.
(60) Provisional application No. 62/138,939, filed on Mar. 26, 2015.
(60) Provisional application No. 62/138,273, filed on Mar. 25, 2015.

(51) Int. Cl. C12N 15/11; C12N 9/22; C12N 9/96; C12N 5/0783; A61K 35/17; A61P 7/00

(52) U.S. Cl. CPC C12N 15/11; A61K 48/00; C12N 9/96; C12N 5/0636; A61K 35/17; A61P 7/00; C12N 2310/20; C12N 2310/318; C12N 2310/336; C12N 2310/317; C12N 2320/51; C12N 2310/335; C12N 2310/334; C12N 2310/315; C12N 2310/3231; C12N 2310/3235; C12N 2310/344; C12N 9/22

(57) ABSTRACT

CRISPR/Cas-related compositions and methods which provide for efficient gene editing of eukaryotic cells using modified gRNAs.

### CROSS-REFERENCE TO RELATED APPLICATIONS

[0001] This application claims the benefit of U.S. Provisional Application Ser. No. 62/138,273 filed on Mar. 25, 2015, U.S. Provisional Application Ser. No. 62/138,939 filed on Mar. 26, 2015, U.S. Provisional Application Ser. No. 62/141,810 filed on Apr. 1, 2015, U.S. Provisional Application Ser. No. 62/159,932 filed on May 11, 2015, U.S. Provisional Application Ser. No. 62/184,103 filed on Jun. 24, 2015, U.S. Provisional Application Ser. No. 62/210,392 filed on Aug. 26, 2015, U.S. Provisional Application Ser. No. 62/220,815 filed on Sep. 18, 2015, and U.S. Provisional Application Ser. No. 62/244,572 filed on Oct. 21, 2015 the disclosures of which are hereby incorporated by reference.

### SEQUENCE LISTING

[0002] The present specification makes reference to a Sequence Listing (submitted electronically as a .txt file named “SEQUENCE LISTING 2011271-0026 EM047PCT.txt” on Mar. 25, 2016). The .txt file was generated on Mar. 24, 2016 and is 1.0 megabyte in size. The entire contents of the Sequence Listing are hereby incorporated by reference.

### FIELD OF THE INVENTION

[0003] The invention relates to CRISPR/Cas-related methods, compositions and components for editing a target nucleic acid sequence, or modulating expression of a target nucleic acid sequence, and applications thereof in connection with certain diseases, cell types and genes.

### BACKGROUND

[0004] The CRISPR (Clustered Regularly Interspaced Short Palindromic Repeats)/Cas (CRISPR-associated) system evolved in bacteria and archaea as an adaptive immune system to defend against viral attack. Upon exposure to a virus, short segments of viral DNA are integrated into the CRISPR locus. RNA is transcribed from a portion of the CRISPR locus that includes the viral sequence. That RNA, which contains sequence complementary to the viral genome, mediates targeting of a Cas protein (e.g., Cas9 protein) to the sequence in the viral genome. The Cas protein cleaves and thereby silences the viral target.

[0005] Recently, the CRISPR/Cas system has been adapted for genome editing in eukaryotic cells. The introduction of site-specific double strand breaks (DSBs) enables target sequence alteration through one of two endogenous DNA repair mechanisms—either non-homologous end-joining (NHEJ) or homology-directed repair (HDR). The CRISPR/Cas system has also been used for gene regulation including transcription repression and activation without altering the target sequence. Targeted gene regulation based on the CRISPR/Cas system can, for example, use an enzymatically inactive Cas9 (also known as a catalytically dead Cas9).

### SUMMARY

[0006] In one aspect, methods and compositions discussed herein provide for efficient gene editing of eukaryotic cells. In particular, we have found that the guide RNA (gRNA) component of the CRISPR/Cas system is more efficient at editing genes in certain cell types ex vivo when it has been modified at or near its 5′ end (e.g., when the 5′ end of a gRNA is modified by the inclusion of a eukaryotic mRNA cap structure or cap analog) and/or when it has been modified to include a 3′ polyA tail. gRNA is not an mRNA and it was therefore unexpected that these mRNA structures should lead to such an improvement. We have also demonstrated that the presence of a 3′ polyA tails with defined lengths can also lead to improved gene editing and that the combination of a 5′ end modification and a 3′ polyA tail can lead to even further improvements. While not wishing to be bound by theory it is believed that these and other modified gRNAs described herein exhibit enhanced stability with certain cell types (e.g., circulating cells such as T cells) and that this might be responsible for the observed improvements.

[0007] The present invention also encompasses the realization that the improvements observed with a gRNA with 5′ caps and/or 3′ polyA tails can be extended to gRNAs that have been modified in other ways to achieve the same type of structural or functional result (e.g., by the inclusion of modified nucleosides or nucleotides, or when an in vitro transcribed gRNA is modified by treatment with a phosphatase to remove the 5′ triphosphate group).

[0008] Thus, in some embodiments, the present invention provides a gRNA molecule comprising a targeting domain which is complementary with a target domain from a gene expressed in a eukaryotic cell, wherein the gRNA molecule is modified at its 5′ end and comprises a 3′ polyA tail. The gRNA molecule may, for example, lack a 5′ triphosphate group (e.g., the 5′ end of the targeting domain lacks a 5′ triphosphate group). The gRNA molecule may alternatively include a 5′ cap (e.g., the 5′ end of the targeting domain includes a 5′ cap). In some embodiments, the 5′ cap comprises a modified guanine nucleotide that is linked to the remainder of the gRNA molecule via a 5′-5′ triphosphate linkage. In some embodiments, the 5′ cap comprises two optionally modified guanine nucleotides that are linked via an optionally modified 5′-5′ triphosphate linkage. In some embodiments, the 5′ end of the gRNA molecule has the chemical formula:

[chemical structure]

[0009] wherein:
[0010] each of B¹ and B^{1′} is independently

[chemical structure]

[0011] each R¹ is independently C₁₋₄ alkyl, optionally substituted by a phenyl or a 6-membered heteroaryl;
[0012] each of R², R^{2′}, and R^{3′} is independently H, F, OH, or O—-C₁₋₄ alkyl;
[0013] each of X, Y, and Z is independently O or S; and
[0014] each of X′ and Y′ is independently O or CH₂.

[0015] In some embodiments the polyA tail is comprised of between 5 and 50 adenine nucleotides, for example between 5 and 40 adenine nucleotides, between 5 and 30 adenine nucleotides, between 10 and 50 adenine nucleotides, between 15 and 25 adenine nucleotides, fewer than 30 adenine nucleotides, fewer than 25 adenine nucleotides or about 20 adenine nucleotides.

[0016] In yet other embodiments, the present invention provides a gRNA molecule comprising a targeting domain which is complementary with a target domain from a gene expressed in a eukaryotic cell, wherein the gRNA molecule comprises a 3′ polyA tail which is comprised of fewer than 30 adenine nucleotides (e.g., fewer than 25 adenine nucleotides, between 15 and 25 adenine nucleotides, or about 20 adenine nucleotides). In some embodiments, these gRNA molecules are further modified at their 5′ end (e.g., as described above).

[0017] A gRNA molecule with a polyA tail may be prepared by different methods, including by adding a polyA tail to a gRNA molecule precursor using a polyadenosine polymerase following in vitro transcription of the gRNA molecule precursor. The gRNA molecule may also be prepared by ligating a polyA oligonucleotide to a gRNA molecule precursor following in vitro transcription using an RNA ligase or a DNA ligase with or without a splinted DNA oligonucleotide complementary to the gRNA molecule precursor and the polyA oligonucleotide. A gRNA molecule with a polyA tail may also be prepared by in vitro transcription from a DNA template. A gRNA molecule including the polyA tail may be prepared synthetically, in one or several pieces that are ligated together by either an RNA ligase or a DNA ligase with or without one or more splinted DNA oligonucleotides.

[0018] The gRNA molecules of the present invention may also contain one or more nucleotides which stabilize the gRNA molecule against nuclease degradation (e.g., one or more modified uridines, one or more modified adenosines, one or more modified cytidines, one or more modified guanosines, and/or one or more sugar-modified ribonucleotides). The phosphate backbone of the gRNA molecule may also be modified (e.g., with one or more phosphothioate groups). In some embodiments, the entire phosphate backbone of the gRNA is modified to include phosphothioate groups. The gRNA molecule may also comprise a locked nucleic acid (LNA) in which a 2′ OH-group is connected to the 4′ carbon of the same ribose sugar and/or a multicyclic nucleotide. The gRNA molecule may also comprise one or more modified nucleotides where the ribose oxygen is replaced with sulfur (S), selenium (Se), or alkylene and/or one or more modified nucleotides with a double bond in the ribose structure and/or one or more modified nucleotides with a ring contraction of ribose or ring expansion of ribose and/or a 4′-S, 4′-Se or a 4′-C-aminomethyl-2′-O-Me modification.

[0019] In some embodiments, the targeting domain is complementary with a target domain (e.g., promoter region) from the FAS, BID, CTLA4, PDCD1, CBLB, PTPN6, TRAC or TRBC gene. In some embodiments, the targeting domain is complementary with a target domain (e.g., coding region, non-coding region, intron or exon) from the CCR5 gene. In some embodiments, the targeting domain is complementary with a target domain (e.g., promoter region) from the HBB or BCL11A gene. In some embodiments, the targeting domain is complementary with a target domain (e.g., promoter region) from the CXCR4 gene.

[0020] The present invention also provides compositions (e.g., ribonucleoprotein compositions) that comprise any of the gRNA molecules described herein complexed with a Cas molecule (e.g., a Cas9 molecule). The present invention also provides compositions that comprise any of the gRNA molecules described herein and a nucleic acid encoding a Cas molecule (e.g., a Cas9 molecule). In some embodiments, the compositions further comprise a second gRNA molecule of the invention which comprises a targeting domain which is complementary to a second target domain of the gene. In some embodiments, the compositions comprise at least two gRNA molecules of the invention to target two or more genes that are expressed in a eukaryotic cell.

[0021] The present invention also provides ex vivo methods and uses of the gRNA molecules and compositions described herein (e.g., uses as a medicament and methods or uses for editing or modulating expression of a gene in a eukaryotic cell).

[0022] Unless otherwise defined, all technical and scientific terms used herein have the same meaning as commonly understood by one of ordinary skill in the art to which this invention belongs. Although methods and materials similar or equivalent to those described herein can be used in the practice or testing of the present invention, suitable methods and materials are described below. All publications, patent applications, patents, and other references mentioned herein are incorporated by reference in their entirety. In addition, the materials, methods, and examples are illustrative only and not intended to be limiting.

[0023] Headings, including numeric and alphabetical headings and subheadings, are for organization and presentation and are not intended to be limiting.

[0024] Other features and advantages of the invention will be apparent from the detailed description, drawings, and from the claims.

### BRIEF DESCRIPTION OF THE DRAWINGS

[0025] FIGS. 1A-1G are representations of several exemplary gRNAs.

[0026] FIG. 1A depicts a modular gRNA molecule derived in part (or modeled on a sequence in part) from Streptococcus pyogenes (S. pyogenes) as a duplexed structure (SEQ ID NO:42 and 43, respectively, in order of appearance);

[0027] FIG. 1B depicts a unimolecular (or chimeric) gRNA molecule derived in part from S. pyogenes as a duplexed structure (SEQ ID NO:44);

[0028] FIG. 1C depicts a unimolecular gRNA molecule derived in part from S. pyogenes as a duplexed structure (SEQ ID NO:45);

[0029] FIG. 1D depicts a unimolecular gRNA molecule derived in part from S. pyogenes as a duplexed structure (SEQ ID NO:46);

[0030] FIG. 1E depicts a unimolecular gRNA molecule derived in part from S. pyogenes as a duplexed structure (SEQ ID NO:47);

[0031] FIG. 1F depicts a modular gRNA molecule derived in part from Streptococcus thermophilus (S. thermophilus) as a duplexed structure (SEQ ID NO:48 and 49, respectively, in order of appearance);

[0032] FIG. 1G depicts an alignment of modular gRNA molecules of S. pyogenes and S. thermophilus (SEQ ID NO:50-53, respectively, in order of appearance).

[0033] FIGS. 2A-2G depict an alignment of Cas9 sequences from Chylinski et al. (RNA Biol. 2013; 10(5): 726-737). The N-terminal RuvC-like domain is boxed and indicated with a “Y”. The other two RuvC-like domains are boxed and indicated with a “B”. The HNH-like domain is boxed and indicated by a “G”. Sm: S. mutans (SEQ ID NO:1); Sp: S. pyogenes (SEQ ID NO:2); St: S. thermophilus (SEQ ID NO:3); Li: L. innocua (SEQ ID NO:4). Motif: this is a motif based on the four sequences: residues conserved in all four sequences are indicated by single letter amino acid abbreviation; “*” indicates any amino acid found in the corresponding position of any of the four sequences; and “-” indicates any amino acid, e.g., any of the 20 naturally occurring amino acids.

[0034] FIGS. 3A-3B show an alignment of the N-terminal RuvC-like domain from the Cas9 molecules disclosed in Chylinski et al (SEQ ID NO:54-103, respectively, in order of appearance). The last line of FIG. 3B identifies 4 highly conserved residues.

[0035] FIGS. 4A-4B show an alignment of the N-terminal RuvC-like domain from the Cas9 molecules disclosed in Chylinski et al. with sequence outliers removed (SEQ ID NO:104-177, respectively, in order of appearance). The last line of FIG. 4B identifies 3 highly conserved residues.

[0036] FIGS. 5A-5C show an alignment of the HNH-like domain from the Cas9 molecules disclosed in Chylinski et al (SEQ ID NO:178-252, respectively, in order of appearance). The last line of FIG. 5C identifies conserved residues.

[0037] FIGS. 6A-6B show an alignment of the HNH-like domain from the Cas9 molecules disclosed in Chylinski et al. with sequence outliers removed (SEQ ID NO:253-302, respectively, in order of appearance). The last line of FIG. 6B identifies 3 highly conserved residues.

[0038] FIGS. 7A-7B depict an alignment of Cas9 sequences from S. pyogenes and Neisseria meningitidis (N. meningitidis). The N-terminal RuvC-like domain is boxed and indicated with a “Y”. The other two RuvC-like domains are boxed and indicated with a “B”. The HNH-like domain is boxed and indicated with a “G”. Sp: S. pyogenes; Nm: N. meningitidis. Motif: this is a motif based on the two sequences: residues conserved in both sequences are indicated by a single amino acid designation; “*” indicates any amino acid found in the corresponding position of any of the two sequences; “-” indicates any amino acid, e.g., any of the 20 naturally occurring amino acids, and “-” indicates any amino acid, e.g., any of the 20 naturally occurring amino acids, or absent.

[0039] FIG. 8 shows a nucleic acid sequence encoding Cas9 of N. meningitidis (SEQ ID NO:303). Sequence indicated by an “R” is an SV40 NLS; sequence indicated as “G” is an HA tag; and sequence indicated by an “O” is a synthetic NLS sequence; the remaining (unmarked) sequence is the open reading frame (ORF).

[0040] FIG. 9A shows the organization of the Cas9 domains, including amino acid positions, in reference to the two lobes of Cas9 (recognition (REC) and nuclease (NUC) lobes).

[0041] FIG. 9B shows the percent homology of each domain across 83 Cas9 orthologs.

[0042] FIG. 10A shows an exemplary structure of a unimolecular gRNA molecule derived in part from S. pyogenes as a duplexed structure (SEQ ID NO:40).

[0043] FIG. 10B shows an exemplary structure of a unimolecular gRNA molecule derived in part from S. aureus as a duplexed structure (SEQ ID NO:41).

[0044] FIG. 11 shows the structure of the 5′ ARCA cap.

[0045] FIG. 12 depicts results from the quantification of live Jurkat T cells post electroporation with Cas9 mRNA and AAVS1 gRNAs. Jurkat T cells were electroporated with S. pyogenes Cas9 mRNA and the respective modified gRNA. 24 hours after electroporation, 1×10⁵ cells were stained with FITC-conjugated Annexin-V specific antibody for 15 minutes at room temperature followed by staining with propidium iodide immediately before analysis by flow cytometry. The percentage of cells that did not stain for either Annexin-V or PI is presented in the bar graph.

[0046] FIG. 13A shows CD4+ T cells electroporated with S. pyogenes Cas9 mRNA and the gRNA indicated (TRBC-210 (SEQ ID NO:388), TRAC-4 (SEQ ID NO:389) or AAVS1_1 (SEQ ID NO:387)) and stained with an APC-CD3 antibody and analyzed by FACS. The cells are stained with a CD3 antibody since CD3 expression on the surface of cells requires the TCR, which comprises 2 subunits: TRAC and TRBC. Staining for CD3, therefore, serves as a proxy for assessing the expression of TRAC and/or TRBC subunits and is used to determine whether gene editing results in the loss of TCR surface expression in targeted T cells. The cells were analyzed on day 2 and day 3 after the electroporation.

[0047] FIG. 13B shows quantification of the CD3 negative population from the plots in FIG. 13A.

[0048] FIG. 13C shows % NHEJ results from the T7E1 assay performed on TRBC2 and TRAC loci.

[0049] FIG. 14A shows Jurkat T cells electroporated with S. aureus Cas9/gRNA (TRAC-233 (SEQ ID NO:390)) RNPs targeting TRAC gene and stained with an APC-CD3 antibody and analyzed by FACS. The cells were analyzed on day 1, day 2 and day 3 after the electroporation.

[0050] FIG. 14B shows quantification of the CD3 negative population from the plots in FIG. 14A.

[0051] FIG. 14C shows % NHEJ results from the T7E1 assay performed on the TRAC locus.

[0052] FIG. 15 shows chromosome 2 locations (according to UCSC Genome Browser hg 19 human genome assembly) that corresponds to BCL11A intron 2. Three erythroid DNase 1-hypersensitivie sites (DHSs) are labeled as distance in kilobases from BCL11A TSS (+62, +58 and +55). BCL11A transcription is from right to left.

[0053] FIG. 16 depicts a scheme of the pair of HBB-8 (SEQ ID NO:398) and HBB-15 (SEQ ID NO:397) surrounding the sickle mutation in combination with a Cas9 nickase (D10A or N863A). The nickases are shown as the grey ovals.

[0054] FIG. 17 depicts the percentages of total editing event after a wildtype Cas9 was combined with HBB-8 (SEQ ID NO:398) or HBB-15 (SEQ ID NO:397) or a Cas9 nickase (D10A or N863A) was combined with the pair of HBB-8 (SEQ ID NO:398) and HBB-15 (SEQ ID NO:397). At least three independent experiments for each condition were used to generate the percentages.

[0055] FIG. 18A depicts the frequency of deletions after a wildtype Cas9 was combined with HBB-8 (SEQ ID NO:398) or HBB-15 (SEQ ID NO:397) or a Cas9 nickase (D10A or N863A) was combined with the pair of HBB-8 (SEQ ID NO:398) and HBB-15 (SEQ ID NO:397). At least 3 independent experiments for each condition were used to generate the percentages.

[0056] FIG. 18B depicts the frequency distribution of the length of deletions using a wildtype Cas9 and HBB-8 (SEQ ID NO:398) (similar results were obtained with HBB-15 (SEQ ID NO:397)).

[0057] FIG. 18C depicts the frequency distribution of the length of deletions using a Cas9 nickase (D10A) with the pair of HBB-8 (SEQ ID NO:398) and HBB-15 (SEQ ID NO:397) (similar results have been obtained using Cas9 N863A).

[0058] FIG. 19A depicts the frequency of gene conversion after a wildtype Cas9 was combined with HBB-8 (SEQ ID NO:398) or HBB-15 (SEQ ID NO:397) or a Cas9 nickase (D10A or N863A) was combined with the pair of HBB-8 (SEQ ID NO:398) and HBB-15 (SEQ ID NO:397).

[0059] FIG. 19B shows a scheme representing the region of similarity between the HBB and HBD loci.

[0060] FIG. 20 depicts the frequency of different lengths of HBD sequences that were incorporated into the HBB locus.

[0061] FIG. 21A depicts the frequency of insertions after a wildtype Cas9 was combined with HBB-8 (SEQ ID NO:398) or HBB-15 (SEQ ID NO:397) or a Cas9 nickase (D10A or N863A) was combined with the pair of HBB-8 (SEQ ID NO:398) and HBB-15 (SEQ ID NO:397). At least three independent experiments for each condition were used to generate the frequencies.

[0062] FIG. 21B depicts examples of common reads observed in U2OS cells electroporated with plasmid encoding a Cas9 nickase (N863A) and the HBB-8 (SEQ ID NO:398) and HBB-15 (SEQ ID NO:397) pair. The HBB reference is shown on the top.

[0063] FIG. 22A is a schematic representation of a donor template and an HBB reference sequence.

[0064] FIG. 22B depicts the frequency of HDR using a wildtype Cas9 with HBB-8 (SEQ ID NO:398) or HBB-15 (SEQ ID NO:397) or a Cas9 nickase (D10A or N863A) with the pair of HBB-8 (SEQ ID NO:398) or HBB-15 (SEQ ID NO:397).

[0065] FIG. 22C depicts the frequency of HDR using a wildtype Cas9 with HBB-8 (SEQ ID NO:398) or HBB-15 (SEQ ID NO:397) or a Cas9 nickase (N863A) with the pair of HBB-8 (SEQ ID NO:398) or HBB-15 (SEQ ID NO:397), each with a double stranded DNA donor or a Cas9 nickase (D10A) with the pair of HBB-8 (SEQ ID NO:398) or HBB-15 (SEQ ID NO:397) and different forms of donors.

[0066] FIG. 23A depicts genome editing of the HBB locus in human K562 erythroleukemia cells after electroporation of Cas9 protein complexed to HBB-8 (SEQ ID NO:398), or HBB-15 (SEQ ID NO:397) (RNP) or Cas9 mRNA co-delivered with HBB-8 (SEQ ID NO:398) or HBB-15 (SEQ ID NO:397) (RNA).

[0067] FIG. 23B depicts the distribution of the editing events in the presence of a wild type Cas9 with HBB-8 (SEQ ID NO:398), HBB-15 (SEQ ID NO:397) and with a Cas9 nickase (D10A) with the HBB-8 (SEQ ID NO:398) and HBB-15 (SEQ ID NO:397) pair.

[0068] FIG. 24A depicts kinetics of human adult CD34⁻ cell expansion after electroporation with uncapped/untailed gRNAs or capped/tailed gRNAs with paired Cas9 mRNA (either S. pyogenes (Sp) or S. aureus (Sa) Cas9). Control samples include: cells that were electroporated with GFP mRNA alone or were not electroporated but were cultured for the indicated time frame.

[0069] FIG. 24B depicts fold change in total live human CD34⁺ cells 72 hours after electroporation.

[0070] FIG. 24C depicts representative flow cytometry data showing maintenance of viable (propidium iodide negative) human adult mobilized peripheral blood CD34⁺ cells after electroporation with capped and tailed AAVS1 gRNA and Cas9 mRNA.

[0071] FIGS. 25A-25G depict electroporation of Cas9 mRNA and capped and tailed gRNA supports efficient editing in human adult mobilized peripheral blood CD34⁻ cells and their progeny.

[0072] FIG. 25A depicts the percentage of insertions/deletions (indels) detected in human adult mobilized peripheral blood CD34⁺ cells and their hematopoietic colony forming cell (CFC) progeny at the targeted AAVS1 locus after delivery of Cas9 mRNA with capped and tailed AAVS1 gRNA compared to uncapped and untailed AAVS1 gRNA.

[0073] FIG. 25B depicts the hematopoietic colony forming potential (CFCs) maintained in human adult mobilized peripheral blood CD34⁺ cells after editing with capped/tailed AAVS1 gRNA. Note loss of CFC potential for cells electroporated with uncapped/untailed AAVS1 gRNA. E: erythroid, G: granulocyte, M: macrophage, GM: granulocyte-macrophage, GEMM: granulocyte-erythrocyte-macrophage-monocyte CFCs.

[0074] FIG. 25C depicts delivery of capped and tailed HBB gRNA with S. pyogenes Cas9 mRNA (RNA) or ribonucleoprotein (RNP) supports efficient targeted locus editing (% indels) in the K562 erythroleukemia cell line, a human erythroleukemia cell line has similar properties to HSCs.

[0075] FIG. 25D depicts Cas9-mediated/capped and tailed gRNA mediated editing (% indels) at the indicated target genetic loci (AAVS1, HBB, CXCR4) in human cord blood CD34⁺ cells. Cells were electroporated with Cas9 mRNA and 2 or 10 μg of gRNA.

[0076] FIG. 25E depicts CFC assays for human umbilical cord blood CD34⁺ cells electroporated with 2 μg or 10 μg of capped/tailed HBB gRNA. CFCs: colony forming cells, GEMM: mixed hematopoietic colony granulocyte-erythrocyte-macrophage-monocyte, E: erythrocyte colony, GM: granulocyte-macrophage colong, G: granulocyte colony.

[0077] FIG. 25F depicts a representative gel image showing cleavage at the indicated loci (T7E1 analysis) in human cord blood CD34⁺ cells at 72 hours after delivery of capped and tailed AAVS1, HBB, or CXCR4 gRNA and S. pyogenes Cas9 mRNA. The example gel corresponds to the summary data shown in FIG. 25D.

[0078] FIG. 25G depicts cell viability in human cord blood (CB) CD34⁺ cells 48 hours after delivery of Cas9 mRNA and indicated gRNAs as determined by co-staining with 7-AAD and Annexin V and flow cytometry analysis.

[0079] FIG. 26A depicts cell viability at 72 hours post-electroporation as determined by co-staining with Annexin V and propidium iodide. The fraction of cells that were negative for Annexin V and PI were categorized as viable and that percentage is represented in the graph.

[0080] FIG. 26B depicts quantification of % NHEJ results from the T7E1 assay performed on the AAVS1 integration site locus at 72 hours. The % NHEJ rates correlated with the viability of the cells. Modified gRNAs outperformed non-modified gRNAs in Jurkat T cells.

[0081] FIGS. 27A-27C depict loss of CD3 expression in CD4⁺ T cells due to delivery of Cas9/gRNA RNP targeting TRBC or TRAC.

[0082] FIG. 27A depicts CD4⁺ T cells electroporated with S. pyogenes Cas9/gRNA (TRBC-210 (SEQ ID NO:388)) RNPs targeting TRBC or S. aureus Cas9/gRNA (TRAC-233 (SEQ ID NO:390)) RNPs targeting TRAC were stained with an APC-CD3 antibody and analyzed by FACS. The cells were analyzed on day 1, 2, 3 and 4 after the electroporation. Representative data from day 4 is shown.

[0083] FIG. 27B depicts cell viability over a 4 day time course.

[0084] FIG. 27C depicts quantification of the CD3 negative population over a 4 day time course as determined by FACS.

[0085] FIGS. 28A-28C depict loss of CD3 expression in CD8+ T cells due to delivery of Cas9/gRNA RNP targeting TRBC or TRAC.

[0086] FIG. 28A depicts CD8⁺ T cells electroporated with S. pyogenes Cas9/gRNA (TRBC-210 (SEQ ID NO:388)) RNPs targeting TRBC or S. aureus Cas9/gRNA (TRAC-233 (SEQ ID NO:390)) RNPs targeting TRAC that were stained with an APC-CD3 antibody and analyzed by FACS. The cells were analyzed on day 2, 3, and 4 after the electroporation. Representative data from day 4 is shown.

[0087] FIG. 28B depicts cell viability over a 4 day time course.

[0088] FIG. 28C depicts quantification of the CD3 negative population over a 4 day time course as determined by FACS.

[0089] FIGS. 29A-29C depict loss of CD3 expression in CD4+ T cells from multiple donors due to delivery of Cas9/gRNA RNP targeting TRBC and TRAC.

[0090] FIG. 29A depicts that CD4⁺ T cells from 3 different donors that were electroporated with S. pyogenes Cas9/gRNA (TRBC-210 (SEQ ID NO:388)) RNPs targeting TRBC or S. aureus Cas9/gRNA (TRAC-233 (SEQ ID NO:390)) RNPs targeting TRAC. The sex, age and blood type is shown.

[0091] FIG. 29B depicts that the cell viability was monitored by trypan blue over a 4 day time course post electroporation. The averages from the 3 separate donors for days 2, 3, and 4 are shown with the error bars indicating the standard deviation.

[0092] FIG. 29C depicts that transfected cells were stained with an APC-CD3 antibody and analyzed by FACS and analyzed on day 2, 3 and 4 after the electroporation. The average CD3 negative population for editing in the 3 separate donors is quantified for days 2, 3, and 4 post electroporation.

[0093] FIG. 30 depicts characterization of genome editing events at the TRAC locus. The TRAC locus around the targeting site of the TRAC specific RNP was amplified from genomic DNA isolated from cells treated with the RNP. The PCR products were cloned into a sequencing vector and the cloned DNA was sequenced by Sanger sequencing using a vector specific sequencing primer. The resulting sequences are shown with the frequency of each sequence tabulated on the left hand side. At the top, the reference sequence is shown. The sequence that is boxed is the PAM site of the gRNA sequence which is underlined. Deletion events are annotated with hyphens and the length of deletion is noted. Insertions are denoted as larger letters in bold text (SEQ ID NOS:419-444).

[0094] FIG. 31 depicts characterization of genome editing events at the TRBC locus. The TRBC locus around the targeting site of the TRBC specific RNP was amplified from genomic DNA isolated from cells treated with the RNP. The PCR products were cloned into a sequencing vector and the cloned DNA was sequenced by Sanger sequencing using a vector specific sequencing primer. The resulting sequences are shown with the frequency of each sequence tabulated on the left hand side. At the top, the reference sequence is shown. The sequence that is boxed is the PAM site of the gRNA sequence which is underlined. Deletion events are annotated with hyphens and the length of deletion is noted. Insertions are denoted as larger letters in bold text (SEQ ID NOS:445-461).

[0095] FIGS. 32A-32C depict loss of PD-1 expression in CD4+ T cells due to the delivery of Cas9/gRNA RNP targeting PDCD1.

[0096] FIG. 32A depicts CD4⁺ T cells that were electroporated with S. pyogenes Cas9/gRNA (PDCD1-108 (SEQ ID NO:399)) RNPs targeting PDCD1 and reactivated using CD3/CD28-conjugated beads and stained with a PE-PD1 antibody 7 days post electroporation by FACS. Representative data from day 7 is shown.

[0097] FIG. 32B depicts PD1 fluorescence of the PDCD1 RNP treated cells was directly compared with the untreated control cells on an overlay histogram plot.

[0098] FIG. 32C depicts quantification of the mean fluorescence intensity (MFI) for the control cells and PDCD1 RNP treated cells.

[0099] FIG. 33 depicts characterization of genome editing events at the PDCD1 locus. The PDCD1 locus around the targeting site of the PDCD1 specific RNP was amplified from genomic DNA isolated from cells treated with the RNP. The PCR products were cloned into a sequencing vector and the cloned DNA was sequenced by Sanger sequencing using a vector specific sequencing primer. The resulting sequences are shown with the frequency of each sequence tabulated on the left hand side. At the top, the reference sequence is shown. The sequence that is boxed is the PAM site of the gRNA sequence which is underlined. Deletion events are annotated with hyphens and the length of deletion is noted. Insertions are denoted as larger letters in bold text (SEQ ID NOS:462-486).

[0100] FIGS. 34A-34B depict an analysis of stability of D10A nickase RNP in vitro and ex vivo in human adult CD34⁺ HSCs.

[0101] FIG. 34A depicts differential Scanning Fluorimetry Shift Assay after complexing D10A protein with the indicated HBB gRNAs added at 1:1 molar ratio gRNA:RNP.

[0102] FIG. 34B depicts detection of Cas9 protein in cell lysates 72 hours after human adult CD34⁺ HSCs were electroporated with D10A nickase RNP or D10A mRNA with gRNAs HBB-8 (SEQ ID NO:398) and HBB-15 (SEQ ID NO:397). The electroporation program (P2 or P3) used is indicated at the top of the image. 2× gRNA: 10 μg of each gRNA was co-delivered with D10A mRNA (vs. 5 μg of each gRNA in the other experiments).

[0103] FIGS. 35A-35C show that human adult CD34⁺ HSCs maintain stem cell phenotype after electroporation with D10A nickase RNP and HBB gRNA pair.

[0104] FIG. 35A shows that gene edited adult CD34⁺ cells maintain expression of stem cell markers CD34 and CD133 at 72 hours after electroporation.

[0105] FIG. 35B depicts absolute live (7-AAD⁻AnnexinV⁻) CD34⁺ cell number at indicated time points relative to electroporation of D10A nickase RNP and HBB gRNA pair.

[0106] FIG. 35C shows that gene edited adult CD34⁺ cells maintain hematopoietic colony forming cell (CFC) activity and multipotency. E: erythroid, G: granulocyte, M: macrophage, GM: granulocyte-macrophage, GEMM: granulocyte-erythrocyte-macrophage-monocyte CFCs.

[0107] FIGS. 36A-36C show that D10A nickase RNP co-delivered with HBB gRNA pair supports gene editing and HDR in human adult CD34⁺ HSCs.

[0108] FIG. 36A depicts percentage of gene editing events as detected by T7E1 endonuclease assay analysis of the HBB locus in human adult CD34⁺ HSCs. RNP* refers to use of alternate electroporation program (P3).

[0109] FIG. 36B depicts DNA sequence analysis of the HBB locus from human adult CD34⁺ HSCs. The subtypes of gene editing events (insertions, deletions, indels, and gene conversion events) are indicated. RNP* refers to use of alternate electroporation program (P3).

[0110] FIG. 36C depicts percentages of types of editing events detected in the gDNA from the human adult CD34⁺ HSCs electroporated with the conditions shown in FIG. 36B. Data are shown as a percentage of all gene editing events.

[0111] FIG. 37 shows flow cytometry analysis of beta-hemoglobin expression in the erythroid progeny differentiated from erythroid progeny of D10A nickase RNP gene-edited adult CD34⁺ HSCs. CFU-E colonies (far left) differentiated from D10A nickase RNP HBB gRNA electroporated CD34⁺ cells were dissociated, fixed, permeabilized, and stained for beta-hemoglobin expression. The gene editing frequencies in the parental CD34⁻ cell population are indicated above the histograms for the indicated samples. The percentage of beta-hemoglobin expression in each colony was determined by flow cytometry and is indicated at the top right of each histogram.

[0112] FIGS. 38A-38B show that human cord blood (CB) CD34⁺ HSCs maintained stem cell phenotype after electroporation with D10A nickase RNP and HBB gRNA pair.

[0113] FIG. 38A left panel depicts a representative flow cytometry analysis plot showing viability (AnnexinV⁻7AAD⁻) human CB CD34⁺ HSCs at 72 hours after electroporation with D10A Cas9 RNP with HBB-8 (SEQ ID NO:398) and HBB-15 (SEQ ID NO:397) gRNAs. Right panel: Absolute live (7-AAD⁻AnnexinV-) human CB CD34⁺ HSC cell number at indicated time points relative to electroporation of D10A nickase RNP HBB gRNA pair.

[0114] FIG. 38B shows that gene edited CB CD34⁺ cells maintained hematopoietic colony forming cell (CFC) activity and multipotency. E: erythroid, G: granulocyte, M: macrophage, GM: granulocyte-macrophage, GEMM: granulocyte-erythrocyte-macrophage-monocyte CFCs. The amounts of D10A nickase RNP delivered per million cells (5 or 10 μg) and the 2-hour recovery temperature (parentheses) after electroporation of the parental CB CD34⁺ cells are indicated.

[0115] FIGS. 39A-39C show that D10A nickase RNP co-delivered with HBB gRNA pair supported gene editing and HDR in human CB CD34⁺ HSCs.

[0116] FIG. 39A depicts percentage of gene editing events as detected by T7E1 endonuclease assay analysis of the HBB locus in gene-edited human CB CD34⁺ HSCs.

[0117] FIG. 39B depicts DNA sequence analysis of the HBB locus in gene-edited human CB CD34⁺ HSCs. The subtypes of gene editing events (insertions, deletions, indels, and gene conversion events) are indicated as a fraction of the total sequencing reads.

[0118] FIG. 39C depicts subtypes of gene editing events expressed as relative percentage to the total number gene editing events detected. The amounts of D10A nickase RNP delivered per million cells (5 or 10 μg) and the 2-hour recovery temperature (parentheses) after electroporation of the parental CB CD34⁺ HSCs are indicated.

[0119] FIGS. 40A-40C show directed differentiation of gene-edited human CB CD34⁺ HSCs into erythroblasts. Flow cytometry analysis of day 18 erythroblasts differentiated from gene edited human CB CD34⁺ HSCs.

[0120] FIG. 40A depicts CD71 (transferrin receptor) and CD235 (Glycophorin A) expression.

[0121] FIG. 40B depicts loss of CD45 and dsDNA through enucleation as indicated by the absence of dsDNA (negative for dsDNA binding dye DRAQS). Note that unlike adult CD34⁺ cells, CB CD34⁺ cells differentiated into fetal-like erythroblasts that express fetal g-hemoglobin (not adult b-hemoglobin).

[0122] FIG. 40C depicts fetal hemoglobin (g-hemoglobin) expression.

[0123] FIGS. 41A-41B show that human CB CD34⁺ HSCs maintained stem cell phenotype after electroporation with Cas9 variant RNPs and HBB gRNA pair.

[0124] FIG. 41A shows that gene edited human CB CD34⁻ cells maintained viability after electroporation with WT Cas9 endotoxin-free (EF WT) Cas9, N863A nickase, or D10A nickase co-delivered with HBB gRNA pair. Absolute live (7-AAD⁻AnnexinV⁻) CD34⁺ cell number at indicated time points relative to electroporation.

[0125] FIG. 41B shows that gene edited CB CD34⁺ cells maintained hematopoietic colony forming cell (CFC) activity and multipotency. E: erythroid, G: granulocyte, M: macrophage, GM: granulocyte-macrophage, GEMM: granulocyte-erythrocyte-macrophage-monocyte CFCs. The amounts of RNP delivered per million cells (10 m) and the 2-hour recovery temperature (parentheses) after electroporation of the parental human CB CD34⁺ cells are indicated.

[0126] FIGS. 42A-42B compare gene editing at the HBB locus in human CB CD34⁺ cells mediated by WT and nickase Cas9 variant RNPs.

[0127] FIG. 42A depicts T7E1 analysis of the percentage of indels detected 72 hours after electroporation at the targeted site in the HBB locus after electroporation of WT Cas9, Endotoxin-free WT Cas9 (EF-WT), N863A nickase, and D10A nickase RNPs, each co-delivered with HBB-8 (SEQ ID NO:398) and HBB-15 (SEQ ID NO:397) gRNA pair.

[0128] FIG. 42B depicts Western blot analysis showing detection of Cas9 variants in cell lysates of CB CD34⁺ cells at the indicated time points after electroporation. The amounts of RNP delivered per million cells (10 μg) and the 2-hour recovery temperature (parentheses) after electroporation of the parental human CB CD34⁺ cells are indicated.

[0129] FIGS. 43A-43B depict comparison of HDR and NHEJ events detected at the HBB locus after gene editing with WT Cas9 and D10A nickase in human CB CD34⁺ HSCs.

[0130] FIG. 43A depicts percentage of gene editing events (72 hours after electroporation) detected by DNA sequencing analysis and shown as a percentage of the total sequence reads. CB CD34⁺ HSCs received RNP (WT Cas9, Endotoxin-free WT Cas9 [EF-WT], N863A and D10A nickases) with HBB-8 (SEQ ID NO:398) and HBB-15 (SEQ ID NO:397) gRNA pair.

[0131] FIG. 43B depicts percentages of types of editing events detected in the gDNA from the cells electroporated with the conditions shown in FIG. 43A. Data are shown as a percentage of all gene editing events. Left to Right: 10 μg WT Cas9 RNP (37° C.), 10 μg endotoxin-free (EF) WT Cas9 RNP (37° C.), 10 μg D10A Cas9 RNP (37° C.), 10 μg D10A Cas9 RNP (30° C.).

[0132] FIGS. 44A-44B depict in vitro transcribed HBB-specific gRNAs generated with polyA tail encoded in DNA template.

[0133] FIG. 44A depicts PCR products of DNA templates for the HBB gRNAs with encoded polyA tails of the indicated lengths. The dominant size-correct PCR products for gRNAs with 10, 20 and 50 length polyA tails are indicated in the solid boxed area. A distribution of PCR products is shown by dashed boxes.

[0134] FIG. 44B depicts a bioanalyzer analysis of in vitro transcribed gRNAs with indicated tail lengths engineered in the DNA template or added enzymatically (E-PAP).

[0135] FIGS. 45A-45C depict gRNAs engineered with 10 and 20 length polyA tails supported gene editing in human CB CD34⁺ HSCs.

[0136] FIG. 45A left panel depicts a representative flow cytometry analysis plot showing viability (AnnexinV⁻7AAD⁻) human CB CD34⁺ HSCs at 72 hours after electroporation with D10A Cas9 RNP with HBB-8 (SEQ ID NO:398) and HBB-15 (SEQ ID NO:397) gRNAs. Right panel: Kinetics of CD34+ cell expansion after electroporation with D10A RNP and HBB-8 (SEQ ID NO:398) and HBB-15 (SEQ ID NO:397) gRNAs with indicated polyA tails.

[0137] FIG. 45B depicts percent viability (AnnexinV⁻7AAD⁻) of cord blood CD34⁺ HSPCs at 72 hours after electroporation with D10A RNP and HBB-8 (SEQ ID NO:398) and HBB-15 (SEQ ID NO:397) gRNAs engineered with the indicated tail lengths.

[0138] FIG. 45C depicts gene editing as detected by T7E1 endonuclease assay and Sanger DNA sequencing of the PCR product of the HBB genomic locus in human CB CD34⁺ HSCs after electroporation with D10A RNP and HBB-8 (SEQ ID NO:398) and HBB-15 (SEQ ID NO:397) gRNAs with the indicated polyA tails.

[0139] FIGS. 46A-46B depict delivery of RNP targeting TRBC using gRNAs that have a polyA tail with a length of 10 or 20 results in efficient knockout as monitored by CD3 expression.

[0140] FIG. 46A depicts cells counts using trypan blue as a Live/Dead cell measure for 72 hours post electroporation.

[0141] FIG. 46B depicts analysis of CD3 expression at day 6 post electroporation by FACS analysis.

[0142] FIGS. 47A-47B depict delivery of RNP targeting PDCD1 using gRNAs that have a polyA tail with a length of 10 or 20 results in efficient knockout as monitored by PD1 expression.

[0143] FIG. 47A depicts cell counts using trypan blue as a Live/Dead cell measure for 72 hours post electroporation.

[0144] FIG. 47B depicts re-stimulated cells at 72 hours post electroporation and analysis of PD-1 expression at day 6 post electroporation by FACS analysis.

[0145] FIGS. 48A and 48B depict the effect of different gRNA modifications at the 3′ end on gene editing percentages in adult mPB CD34⁺ cells.

[0146] FIG. 48A depicts gene editing percentages that were determined by T7E1 assay analysis.

[0147] FIG. 48B depicts DNA sequencing analysis at the human HBB locus from HBB PCR products generated from the genomic DNA isolated from adult mPB CD34⁺ cells after electroporation (Amaxa Nucleofector) with Cas9 RNP (wild-type Cas9 protein complexed to HBB-8 gRNA (SEQ ID NO:398)).

[0148] FIGS. 49A, 49B, and 49C depict the effect of including a 5′ end modification (ARCA cap) and/or a 3′ end modification (polyA tail of a specific length) in gRNAs on the gene editing and hematopoietic potential (e.g., CFC) of adult mPB CD34⁺ cells and CB CD34⁺ cells.

[0149] FIG. 49A depicts the results of an experiment where gRNAs HBB-8 (SEQ ID NO:398) and HBB-15 (SEQ ID NO:397) were in vitro transcribed with the indicated 5′ and 3′ end modifications, complexed to D10A Cas9 protein, and electroporated into adult mPB CD34⁺ cells (Amaxa Nucleofector). Gene editing results are shown in the left panel while CFC potential results are showin the right panel.

[0150] FIG. 49B depicts comparative gene editing (left panel), fold expansion (middle panel) and CFC potential (right panel) of CB CD34⁺ cells after electroporation with D10A Cas9 RNP targeting HBB locus (dual nickase strategy, in which HBB-8 (SEQ ID NO:398) and HBB-15 (SEQ ID NO:397) gRNAs are both modified at 5′ and/or 3′ end).

[0151] FIG. 49C depicts the effect of electroporation of CB CD34⁺ cells with unmodified IVT gRNAs, single (5′ or 3′) or double (both 5′ and 3′) end modified IVT gRNAs, on gene editing (left panel) and CFC potential (right panel) in CB CD34⁺ cells.

[0152] FIGS. 50A, 50B, 50C, and 50D demonstrate that Cas9 RNP supports highly efficient gene editing at the HBB locus in human adult and cord blood CD34⁺ hematopoietic stem/progenitor cells from 15 different stem cell donors after electroporation of RNP. Paired t-tests were performed for each donor pair represented by the data in FIG. 50A-FIG. 50D.

[0153] FIG. 50A depicts a summary of gene editing results as determined by DNA sequencing of composite data from n=15 CD34⁻ cell donors and 15 experiments. Gene editing is shown for cord blood (CB) and adult mobilized peripheral blood (mPB) CD34⁺ cell donors. The Cas9 variant (D10A nickase or wild type, WT) are indicated.

[0154] FIG. 50B depicts a summary of types of editing events detected in experiments in which CD34⁺ cells (n=10 donors) were contacted with D10A nickase RNP and gRNA pair (HBB-8 (SEQ ID NO:398) and HBB-15 (SEQ ID NO:397)).

[0155] FIG. 50C shows fold expansion of RNP treated and paired untreated control CD34⁺ cells 2-3 days after electroporation.

[0156] FIG. 50D depicts a composite summary of CFC data indicating the total colonies differentiated from human CD34⁺ cells, erythroid and myeloid subtypes (n=10 donors). Mean and standard deviation are shown for all plots.

[0157] FIG. 51A shows that the cell population of MNC culture in T cell media was 72% CD3⁺ by day 3 (left panel) and greater than 98% by day 7 (right panel).

[0158] FIG. 51B shows that re-plating the edited cells into culture with CD3/CD28 beads for cell reactivation improved the total viability of the electroporated cells in comparison to cells plated in T cell media without CD3/CD28 beads (% viability determined by flow cytometry analysis after staining with apoptosis stains 7-AAD and Annexin V).

[0159] FIG. 51C shows that the gRNA combination HBB-8-sickle (SEQ ID NO:414) and HBB-15 (SEQ ID NO:397) (each complexed to D10A Cas9 protein) supported 48% total editing, as detected by T7E1 endonuclease assay analysis of the HBB PCR product.

### DETAILED DESCRIPTION

[0160] Definitions

[0161] “ALT-HDR” or “alternative HDR”, or alternative homology-directed repair, as used herein, refers to the process of repairing DNA damage using a homologous nucleic acid (e.g., an endogenous homologous sequence, e.g., a sister chromatid, or an exogenous nucleic acid, e.g., a template nucleic acid). ALT-HDR is distinct from canonical HDR in that the process utilizes different pathways from canonical HDR, and can be inhibited by the canonical HDR mediators, RAD51 and BRCA2. Also, ALT-HDR uses a single-stranded or nicked homologous nucleic acid for repair of the break.

[0162] “Canonical HDR”, or canonical homology-directed repair, as used herein, refers to the process of repairing DNA damage using a homologous nucleic acid (e.g., an endogenous homologous sequence, e.g., a sister chromatid, or an exogenous nucleic acid, e.g., a template nucleic acid). Canonical HDR typically acts when there has been significant resection at the double strand break, forming at least one single stranded portion of DNA. In a normal cell, HDR typically involves a series of steps such as recognition of the break, stabilization of the break, resection, stabilization of single stranded DNA, formation of a DNA crossover intermediate, resolution of the crossover intermediate, and ligation. The process requires RAD51 and BRCA2, and the homologous nucleic acid is typically double-stranded.

[0163] Unless indicated otherwise, the term “HDR” as used herein encompasses canonical HDR and alt-HDR.

[0164] “Domain”, as used herein, is used to describe segments of a protein or nucleic acid. Unless otherwise indicated, a domain is not required to have any specific functional property.

[0165] Calculations of homology or sequence identity between two sequences (the terms are used interchangeably herein) are performed as follows. The sequences are aligned for optimal comparison purposes (e.g., gaps can be introduced in one or both of a first and a second amino acid or nucleic acid sequence for optimal alignment and non-homologous sequences can be disregarded for comparison purposes). The optimal alignment is determined as the best score using the GAP program in the GCG software package with a Blossum 62 scoring matrix with a gap penalty of 12, a gap extend penalty of 4, and a frame shift gap penalty of 5. The amino acid residues or nucleotides at corresponding amino acid positions or nucleotide positions are then compared. When a position in the first sequence is occupied by the same amino acid residue or nucleotide as the corresponding position in the second sequence, then the molecules are identical at that position. The percent identity between the two sequences is a function of the number of identical positions shared by the sequences.

[0166] “Governing gRNA molecule”, as used herein, refers to a gRNA molecule that comprises a targeting domain that is complementary to a target domain on a nucleic acid that comprises a sequence that encodes a component of the CRISPR/Cas system that is introduced into a cell. A governing gRNA does not target an endogenous cell. In an embodiment, a governing gRNA molecule comprises a targeting domain that is complementary with a target sequence on: (a) a nucleic acid that encodes a Cas (e.g., Cas9) molecule; (b) a nucleic acid that encodes a gRNA which comprises a targeting domain for a gene (a target gene gRNA); or on more than one nucleic acid that encodes a CRISPR/Cas component, e.g., both (a) and (b). In an embodiment, a nucleic acid molecule that encodes a CRISPR/Cas component, e.g., that encodes a Cas9 molecule or a target gene gRNA, comprises more than one target domain that is complementary with a governing gRNA targeting domain. While not wishing to be bound by theory, it is believed that in such embodiments a governing gRNA molecule complexes with a Cas9 molecule and results in Cas9 mediated inactivation of the targeted nucleic acid, e.g., by cleavage or by binding to the nucleic acid, and results in cessation or reduction of the production of a CRISPR/Cas system component. In an embodiment, the Cas9 molecule forms two complexes: a complex comprising a Cas9 molecule with a target gene gRNA, which complex will alter the gene; and a complex comprising a Cas9 molecule with a governing gRNA molecule, which complex will act to prevent further production of a CRISPR/Cas system component, e.g., a Cas9 molecule or a target gene gRNA molecule. In an embodiment, a governing gRNA molecule/Cas molecule (e.g., gRNA molecule/Cas9 molecule) complex binds to or promotes cleavage of a control region sequence, e.g., a promoter, operably linked to a sequence that encodes a Cas9 molecule, a sequence that encodes a transcribed region, an exon, or an intron, for the Cas9 molecule. In an embodiment, a governing gRNA molecule/Cas molecule (e.g., gRNA molecule/Cas9 molecule) complex binds to or promotes cleavage of a control region sequence, e.g., a promoter, operably linked to a gRNA molecule, or a sequence that encodes the gRNA molecule. In an embodiment, the governing gRNA, e.g., a Cas9-targeting governing gRNA molecule, or a target gene gRNA-targeting governing gRNA molecule, limits the effect of the Cas9 molecule/target gene gRNA molecule complex-mediated gene targeting. In an embodiment, a governing gRNA places temporal, level of expression, or other limits, on activity of the Cas9 molecule/target gene gRNA molecule complex. In an embodiment, a governing gRNA reduces off-target or other unwanted activity. In an embodiment, a governing gRNA molecule inhibits, e.g., entirely or substantially entirely inhibits, the production of a component of the Cas9 system and thereby limits, or governs, its activity.

[0167] “Modulator”, as used herein, refers to an entity, e.g., a drug, which can alter the activity (e.g., enzymatic activity, transcriptional activity, or translational activity), amount, distribution, or structure of a subject molecule or genetic sequence. In an embodiment, modulation comprises cleavage, e.g., breaking of a covalent or non-covalent bond, or the forming of a covalent or non-covalent bond, e.g., the attachment of a moiety, to the subject molecule. In an embodiment, a modulator alters the, three dimensional, secondary, tertiary, or quaternary structure, of a subject molecule. A modulator can increase, decrease, initiate, or eliminate a subject activity.

[0168] “Large molecule”, as used herein, refers to a molecule having a molecular weight of at least 2, 3, 5, 10, 20, 30, 40, 50, 60, 70, 80, 90, or 100 kD. Large molecules include proteins, polypeptides, nucleic acids, biologics, and carbohydrates.

[0169] “Polypeptide”, as used herein, refers to a polymer of amino acids having less than 100 amino acid residues. In an embodiment, it has less than 50, 20, or 10 amino acid residues.

[0170] “Non-homologous end joining” or “NHEJ”, as used herein, refers to ligation mediated repair and/or non-template mediated repair including, e.g., canonical NHEJ (cNHEJ), alternative NHEJ (altNHEJ), microhomology-mediated end joining (MMEJ), single-strand annealing (SSA), and synthesis-dependent microhomology-mediated end joining (SD-MMEJ).

[0171] “Reference molecule”, e.g., a reference Cas (e.g., Cas9) molecule or reference gRNA, as used herein, refers to a molecule to which a subject molecule, e.g., a subject Cas9 molecule of subject gRNA molecule, e.g., a modified or candidate Cas9 molecule is compared. For example, a Cas9 molecule can be characterized as having no more than 10% of the nuclease activity of a reference Cas9 molecule. Examples of reference Cas9 molecules include naturally occurring unmodified Cas9 molecules, e.g., a naturally occurring Cas9 molecule such as a Cas9 molecule of S. pyogenes, S. aureus, or S. thermophilus. In an embodiment, the reference Cas9 molecule is the naturally occurring Cas9 molecule having the closest sequence identity or homology with the Cas9 molecule to which it is being compared. In an embodiment, the reference Cas9 molecule is a sequence, e.g., a naturally occurring or known sequence, which is the parental form on which a change, e.g., a mutation has been made.

[0172] “Replacement”, or “replaced”, as used herein with reference to a modification of a molecule does not require a process limitation but merely indicates that the replacement entity is present.

[0173] “Small molecule”, as used herein, refers to a compound having a molecular weight less than about 2 kD, e.g., less than about 2 kD, less than about 1.5 kD, less than about 1 kD, or less than about 0.75 kD.

[0174] “Subject”, as used herein, may mean either a human or non-human animal. The term includes, but is not limited to, mammals (e.g., humans, other primates, pigs, rodents (e.g., mice and rats or hamsters), rabbits, guinea pigs, cows, horses, cats, dogs, sheep, and goats). In an embodiment, the subject is a human. In other embodiments, the subject is poultry.

[0175] “Treat”, “treating” and “treatment”, as used herein, mean the treatment of a disease in a mammal, e.g., in a human, including (a) inhibiting the disease, i.e., arresting or preventing its development; (b) relieving the disease, i.e., causing regression of the disease state; and (c) curing the disease.

[0176] “X” as used herein in the context of an amino acid sequence, refers to any amino acid (e.g., any of the twenty natural amino acids) unless otherwise specified.

I. gRNA Molecules

[0177] A gRNA molecule, as that term is used herein, refers to a nucleic acid that promotes the specific targeting or homing of a gRNA molecule/Cas molecule complex (e.g., a gRNA/Cas9 complex) to a target nucleic acid. gRNA molecules can be unimolecular (having a single RNA molecule), sometimes referred to herein as “chimeric” gRNAs, or modular (comprising more than one, and typically two, separate RNA molecules). A gRNA molecule comprises a number of domains. The gRNA molecule domains are described in more detail below.

[0178] Several exemplary gRNA structures, with domains indicated thereon, are provided in FIG. 1. While not wishing to be bound by theory, with regard to the three dimensional form, or intra- or inter-strand interactions of an active form of a gRNA, regions of high complementarity are sometimes shown as duplexes in FIG. 1 and other depictions provided herein.

[0179] In an embodiment, a unimolecular, or chimeric, gRNA comprises, preferably from 5′ to 3′:
[0180] a targeting domain (which is complementary to a target nucleic acid in a gene);
[0181] a first complementarity domain;
[0182] a linking domain;
[0183] a second complementarity domain (which is complementary to the first complementarity domain);
[0184] a proximal domain; and
[0185] optionally, a tail domain.

[0186] In an embodiment, a modular gRNA comprises:
[0187] a first strand comprising, preferably from 5′ to 3′;
   [0188] a targeting domain (which is complementary to a target nucleic acid in a gene); and
   [0189] a first complementarity domain; and
[0190] a second strand, comprising, preferably from 5′ to 3′:
[0191] optionally, a 5′ extension domain;
[0192] a second complementarity domain;
[0193] a proximal domain; and
[0194] optionally, a tail domain.

[0195] The domains are discussed briefly below.

[0196] The Targeting Domain

[0197] FIGS. 1A-1G provide examples of the placement of targeting domains.

[0198] The targeting domain comprises a nucleotide sequence that is complementary, e.g., at least 80, 85, 90, 95, 98 or 99% complementary, e.g., fully complementary, to the target sequence on the target nucleic acid. The targeting domain is part of an RNA molecule and will therefore comprise the base uracil (U), while any DNA encoding the gRNA molecule will comprise the base thymine (T). While not wishing to be bound by theory, in an embodiment, it is believed that the complementarity of the targeting domain with the target sequence contributes to specificity of the interaction of the gRNA molecule/Cas molecule (e.g., gRNA molecule/Cas9 molecule) complex with a target nucleic acid. It is understood that in a targeting domain and target sequence pair, the uracil bases in the targeting domain will pair with the adenine bases in the target sequence. In an embodiment, the target domain itself comprises in the 5′ to 3′ direction, an optional secondary domain, and a core domain. In an embodiment, the core domain is fully complementary with the target sequence. In an embodiment, the targeting domain is 5 to 50 nucleotides in length. The strand of the target nucleic acid with which the targeting domain is complementary is referred to herein as the complementary strand. Some or all of the nucleotides of the domain can have a modification, e.g., modification found in Section VIII herein.

[0199] In an embodiment, the targeting domain is 16 nucleotides in length.

[0200] In an embodiment, the targeting domain is 17 nucleotides in length.

[0201] In an embodiment, the targeting domain is 18 nucleotides in length.

[0202] In an embodiment, the targeting domain is 19 nucleotides in length.

[0203] In an embodiment, the targeting domain is 20 nucleotides in length.

[0204] In an embodiment, the targeting domain is 21 nucleotides in length.

[0205] In an embodiment, the targeting domain is 22 nucleotides in length.

[0206] In an embodiment, the targeting domain is 23 nucleotides in length.

[0207] In an embodiment, the targeting domain is 24 nucleotides in length.

[0208] In an embodiment, the targeting domain is 25 nucleotides in length.

[0209] In an embodiment, the targeting domain is 26 nucleotides in length.

[0210] In an embodiment, the targeting domain comprises 16 nucleotides.

[0211] In an embodiment, the targeting domain comprises 17 nucleotides.

[0212] In an embodiment, the targeting domain comprises 18 nucleotides.

[0213] In an embodiment, the targeting domain comprises 19 nucleotides.

[0214] In an embodiment, the targeting domain comprises 20 nucleotides.

[0215] In an embodiment, the targeting domain comprises 21 nucleotides.

[0216] In an embodiment, the targeting domain comprises 22 nucleotides.

[0217] In an embodiment, the targeting domain comprises 23 nucleotides.

[0218] In an embodiment, the targeting domain comprises 24 nucleotides.

[0219] In an embodiment, the targeting domain comprises 25 nucleotides.

[0220] In an embodiment, the targeting domain comprises 26 nucleotides.

[0221] Targeting domains are discussed in more detail below.

[0222] The First Complementarity Domain

[0223] FIGS. 1A-1G provide examples of first complementarity domains.

[0224] The first complementarity domain is complementary with the second complementarity domain, and in an embodiment, has sufficient complementarity to the second complementarity domain to form a duplexed region under at least some physiological conditions. In an embodiment, the first complementarity domain is 5 to 30 nucleotides in length. In an embodiment, the first complementarity domain is 5 to 25 nucleotides in length. In an embodiment, the first complementary domain is 7 to 25 nucleotides in length. In an embodiment, the first complementary domain is 7 to 22 nucleotides in length. In an embodiment, the first complementary domain is 7 to 18 nucleotides in length. In an embodiment, the first complementary domain is 7 to 15 nucleotides in length. In an embodiment, the first complementary domain is 5, 6, 7, 8, 9, 10, 11, 12, 13, 14, 15, 16, 17, 18, 19, 20, 21, 22, 23, 24, or 25 nucleotides in length.

[0225] In an embodiment, the first complementarity domain comprises 3 subdomains, which, in the 5′ to 3′ direction are: a 5′ subdomain, a central subdomain, and a 3′ subdomain. In an embodiment, the 5′ subdomain is 4-9, e.g., 4, 5, 6, 7, 8 or 9 nucleotides in length. In an embodiment, the central subdomain is 1, 2, or 3, e.g., 1, nucleotide in length. In an embodiment, the 3′ subdomain is 3 to 25, e.g., 4-22, 4-18, or 4 to 10, or 3, 4, 5, 6, 7, 8, 9, 10, 11, 12, 13, 14, 15, 16, 17, 18, 19, 20, 21, 22, 23, 24, or 25, nucleotides in length.

[0226] The first complementarity domain can share homology with, or be derived from, a naturally occurring first complementarity domain. In an embodiment, it has at least 50% homology with a first complementarity domain disclosed herein, e.g., an S. pyogenes, S. aureus, N. meningtidis, or S. thermophilus, first complementarity domain.

[0227] Some or all of the nucleotides of the first complementarity domain can have a modification, e.g., a modification found in Section VIII herein.

[0228] First complementarity domains are discussed in more detail below.

[0229] The Linking Domain

[0230] FIGS. 1A-1G provide examples of linking domains.

[0231] A linking domain serves to link the first complementarity domain with the second complementarity domain of a unimolecular gRNA. The linking domain can link the first and second complementarity domains covalently or non-covalently. In an embodiment, the linkage is covalent. In an embodiment, the linking domain covalently couples the first and second complementarity domains, see, e.g., FIGS. 1B-1E. In an embodiment, the linking domain is, or comprises, a covalent bond interposed between the first complementarity domain and the second complementarity domain. Typically the linking domain comprises one or more, e.g., 2, 3, 4, 5, 6, 7, 8, 9, or 10 nucleotides.

[0232] In modular gRNA molecules the two molecules are associated by virtue of the hybridization of the complementarity domains see e.g., FIG. 1A.

[0233] A wide variety of linking domains are suitable for use in unimolecular gRNA molecules. Linking domains can consist of a covalent bond, or be as short as one or a few nucleotides, e.g., 1, 2, 3, 4, or 5 nucleotides in length. In an embodiment, a linking domain is 2, 3, 4, 5, 6, 7, 8, 9, 10, 15, 20, or 25 or more nucleotides in length. In an embodiment, a linking domain is 2 to 50, 2 to 40, 2 to 30, 2 to 20, 2 to 10, or 2 to 5 nucleotides in length. In an embodiment, a linking domain shares homology with, or is derived from, a naturally occurring sequence, e.g., the sequence of a tracrRNA that is 5′ to the second complementarity domain. In an embodiment, the linking domain has at least 50% homology with a linking domain disclosed herein.

[0234] Some or all of the nucleotides of the linking domain can have a modification, e.g., a modification found in Section VIII herein.

[0235] Linking domains are discussed in more detail below.

[0236] The 5′ Extension Domain

[0237] In an embodiment, a modular gRNA can comprise additional sequence, 5′ to the second complementarity domain, referred to herein as the 5′ extension domain, see, e.g., FIG. 1A. In an embodiment, the 5′ extension domain is, 2-10, 2-9, 2-8, 2-7, 2-6, 2-5, or 2-4 nucleotides in length. In an embodiment, the 5′ extension domain is 2, 3, 4, 5, 6, 7, 8, 9, or 10 or more nucleotides in length.

[0238] The Second Complementarity Domain

[0239] FIGS. 1A-1G provide examples of second complementarity domains.

[0240] The second complementarity domain is complementary with the first complementarity domain, and in an embodiment, has sufficient complementarity to the second complementarity domain to form a duplexed region under at least some physiological conditions. In an embodiment, e.g., as shown in FIGS. 1A-1B, the second complementarity domain can include sequence that lacks complementarity with the first complementarity domain, e.g., sequence that loops out from the duplexed region.

[0241] In an embodiment, the second complementarity domain is 5 to 27 nucleotides in length. In an embodiment, it is longer than the first complementarity region. In an embodiment the second complementary domain is 7 to 27 nucleotides in length. In an embodiment, the second complementary domain is 7 to 25 nucleotides in length. In an embodiment, the second complementary domain is 7 to 20 nucleotides in length. In an embodiment, the second complementary domain is 7 to 17 nucleotides in length. In an embodiment, the complementary domain is 5, 6, 7, 8, 9, 10, 11, 12, 13, 14, 15, 16, 17, 18, 19, 20, 21, 22, 23, 24, 25, or 26 nucleotides in length.

[0242] In an embodiment, the second complementarity domain comprises 3 subdomains, which, in the 5′ to 3′ direction are: a 5′ subdomain, a central subdomain, and a 3′ subdomain. In an embodiment, the 5′ subdomain is 3 to 25, e.g., 4 to 22, 4 to 18, or 4 to 10, or 3, 4, 5, 6, 7, 8, 9, 10, 11, 12, 13, 14, 15, 16, 17, 18, 19, 20, 21, 22, 23, 24, or 25 nucleotides in length. In an embodiment, the central subdomain is 1, 2, 3, 4 or 5, e.g., 3, nucleotides in length. In an embodiment, the 3′ subdomain is 4 to 9, e.g., 4, 5, 6, 7, 8 or 9 nucleotides in length.

[0243] In an embodiment, the 5′ subdomain and the 3′ subdomain of the first complementarity domain, are respectively, complementary, e.g., fully complementary, with the 3′ subdomain and the 5′ subdomain of the second complementarity domain.

[0244] The second complementarity domain can share homology with or be derived from a naturally occurring second complementarity domain. In an embodiment, it has at least 50% homology with a second complementarity domain disclosed herein, e.g., an S. pyogenes, S. aureus, N. meningtidis, or S. thermophilus, first complementarity domain.

[0245] Some or all of the nucleotides of the second complementarity domain can have a modification, e.g., a modification found in Section VIII herein.

[0246] A Proximal Domain

[0247] FIGS. 1A-1G provide examples of proximal domains.

[0248] In an embodiment, the proximal domain is 5 to 20 nucleotides in length. In an embodiment, the proximal domain can share homology with or be derived from a naturally occurring proximal domain. In an embodiment, it has at least 50% homology with a proximal domain disclosed herein, e.g., an S. pyogenes, S. aureus, N. meningtidis, or S. thermophilus, proximal domain.

[0249] Some or all of the nucleotides of the proximal domain can have a modification, e.g., a modification found in Section VIII herein.

[0250] A Tail Domain

[0251] FIGS. 1A-1G provide examples of tail domains.

[0252] As can be seen by inspection of the tail domains in FIG. 1A and FIGS. 1B-1F, a broad spectrum of tail domains are suitable for use in gRNA molecules. In an embodiment, the tail domain is 0 (absent), 1, 2, 3, 4, 5, 6, 7, 8, 9, or 10 nucleotides in length. In embodiment, the tail domain nucleotides are from or share homology with sequence from the 5′ end of a naturally occurring tail domain, see e.g., FIG. 1D or 1E. In an embodiment, the tail domain includes sequences that are complementary to each other and which, under at least some physiological conditions, form a duplexed region.

[0253] In an embodiment, the tail domain is absent or is 1 to 50 nucleotides in length. In an embodiment, the tail domain can share homology with or be derived from a naturally occurring proximal tail domain. In an embodiment, it has at least 50% homology with a tail domain disclosed herein, e.g., an S. pyogenes, S. aureus, N. meningtidis, or S. thermophilus, tail domain.

[0254] In an embodiment, the tail domain includes nucleotides at the 3′ end that are related to the method of in vitro transcription. When a T7 promoter is used for in vitro transcription of the gRNA, these nucleotides may be any nucleotides present before the 3′ end of the DNA template. When alternate pol-III promoters are used, these nucleotides may be various numbers or uracil bases or may include alternate bases.

[0255] The domains of gRNA molecules are described in more detail below.

[0256] The Targeting Domain

[0257] The “targeting domain” of the gRNA is complementary to the “target domain” on the target nucleic acid. The strand of the target nucleic acid comprising the core domain target is referred to herein as the “complementary strand” of the target nucleic acid. Guidance on the selection of targeting domains can be found, e.g., in Fu Y et al., Nat Biotechnol 2014 (doi: 10.1038/nbt.2808) and Sternberg S H et al., Nature 2014 (doi: 10.1038/nature13011).

[0258] In an embodiment, the targeting domain is 16, 17, 18, 19, 20, 21, 22, 23, 24, 25 or 26 nucleotides in length.

[0259] In an embodiment, the targeting domain is 16 nucleotides in length.

[0260] In an embodiment, the targeting domain is 17 nucleotides in length.

[0261] In an embodiment, the targeting domain is 18 nucleotides in length.

[0262] In an embodiment, the targeting domain is 19 nucleotides in length.

[0263] In an embodiment, the targeting domain is 20 nucleotides in length.

[0264] In an embodiment, the targeting domain is 21 nucleotides in length.

[0265] In an embodiment, the targeting domain is 22 nucleotides in length.

[0266] In an embodiment, the targeting domain is 23 nucleotides in length.

[0267] In an embodiment, the targeting domain is 24 nucleotides in length.

[0268] In an embodiment, the targeting domain is 25 nucleotides in length.

[0269] In an embodiment, the targeting domain is 26 nucleotides in length.

[0270] In an embodiment, the targeting domain comprises 16 nucleotides.

[0271] In an embodiment, the targeting domain comprises 17 nucleotides.

[0272] In an embodiment, the targeting domain comprises 18 nucleotides.

[0273] In an embodiment, the targeting domain comprises 19 nucleotides.

[0274] In an embodiment, the targeting domain comprises 20 nucleotides.

[0275] In an embodiment, the targeting domain comprises 21 nucleotides.

[0276] In an embodiment, the targeting domain comprises 22 nucleotides.

[0277] In an embodiment, the targeting domain comprises 23 nucleotides.

[0278] In an embodiment, the targeting domain comprises 24 nucleotides.

[0279] In an embodiment, the targeting domain comprises 25 nucleotides.

[0280] In an embodiment, the targeting domain comprises 26 nucleotides. In an embodiment, the targeting domain is 10+/−5, 20+/−5, 30+/−5, 40+/−5, 50+/−5, 60+/−5, 70+/−5, 80+/−5, 90+/−5, or 100+/−5 nucleotides, in length.

[0281] In an embodiment, the targeting domain is 20+/−5 nucleotides in length.

[0282] In an embodiment, the targeting domain is 20+/−10, 30+/−10, 40+/−10, 50+/−10, 60+/−10, 70+/−10, 80+/−10, 90+/−10, or 100+/−10 nucleotides, in length.

[0283] In an embodiment, the targeting domain is 30+/−10 nucleotides in length.

[0284] In an embodiment, the targeting domain is 10 to 100, 10 to 90, 10 to 80, 10 to 70, 10 to 60, 10 to 50, 10 to 40, 10 to 30, 10 to 20 or 10 to 15 nucleotides in length.

[0285] In other embodiments, the targeting domain is 20 to 100, 20 to 90, 20 to 80, 20 to 70, 20 to 60, 20 to 50, 20 to 40, 20 to 30, or 20 to 25 nucleotides in length.

[0286] Typically the targeting domain has full complementarity with the target sequence. In some embodiments the targeting domain has or includes 1, 2, 3, 4, 5, 6, 7 or 8 nucleotides that are not complementary with the corresponding nucleotide of the targeting domain.

[0287] In an embodiment, the target domain includes 1, 2, 3, 4 or 5 nucleotides that are complementary with the corresponding nucleotide of the targeting domain within 5 nucleotides of its 5′ end. In an embodiment, the target domain includes 1, 2, 3, 4 or 5 nucleotides that are complementary with the corresponding nucleotide of the targeting domain within 5 nucleotides of its 3′ end.

[0288] In an embodiment, the target domain includes 1, 2, 3, or 4 nucleotides that are not complementary with the corresponding nucleotide of the targeting domain within 5 nucleotides of its 5′ end. In an embodiment, the target domain includes 1, 2, 3, or 4 nucleotides that are not complementary with the corresponding nucleotide of the targeting domain within 5 nucleotides of its 3′ end.

[0289] In an embodiment, the degree of complementarity, together with other properties of the gRNA, is sufficient to allow targeting of a Cas9 molecule to the target nucleic acid.

[0290] In some embodiments, the targeting domain comprises two consecutive nucleotides that are not complementary to the target domain (“non-complementary nucleotides”), e.g., two consecutive noncomplementary nucleotides that are within 5 nucleotides of the 5′ end of the targeting domain, within 5 nucleotides of the 3′ end of the targeting domain, or more than 5 nucleotides away from one or both ends of the targeting domain.

[0291] In an embodiment, no two consecutive nucleotides within 5 nucleotides of the 5′ end of the targeting domain, within 5 nucleotides of the 3′ end of the targeting domain, or within a region that is more than 5 nucleotides away from one or both ends of the targeting domain, are not complementary to the targeting domain.

[0292] In an embodiment, there are no noncomplementary nucleotides within 5 nucleotides of the 5′ end of the targeting domain, within 5 nucleotides of the 3′ end of the targeting domain, or within a region that is more than 5 nucleotides away from one or both ends of the targeting domain.

[0293] In an embodiment, the targeting domain nucleotides do not comprise modifications, e.g., modifications of the type provided in Section VIII. However, in an embodiment, the targeting domain comprises one or more modifications, e.g., modifications that render it less susceptible to degradation or more bio-compatible, e.g., less immunogenic. By way of example, the backbone of the targeting domain can be modified with a phosphorothioate, or other modification(s) from Section VIII. In an embodiment, a nucleotide of the targeting domain can comprise a 2′ modification, e.g., a 2-acetylation, e.g., a 2′ methylation, or other modification(s) from Section VIII.

[0294] In some embodiments, the targeting domain includes 1, 2, 3, 4, 5, 6, 7 or 8 or more modifications. In an embodiment, the targeting domain includes 1, 2, 3, or 4 modifications within 5 nucleotides of its 5′ end. In an embodiment, the targeting domain comprises as many as 1, 2, 3, or 4 modifications within 5 nucleotides of its 3′ end.

[0295] In some embodiments, the targeting domain comprises modifications at two consecutive nucleotides, e.g., two consecutive nucleotides that are within 5 nucleotides of the 5′ end of the targeting domain, within 5 nucleotides of the 3′ end of the targeting domain, or more than 5 nucleotides away from one or both ends of the targeting domain.

[0296] In an embodiment, no two consecutive nucleotides are modified within 5 nucleotides of the 5′ end of the targeting domain, within 5 nucleotides of the 3′ end of the targeting domain, or within a region that is more than 5 nucleotides away from one or both ends of the targeting domain. In an embodiment, no nucleotide is modified within 5 nucleotides of the 5′ end of the targeting domain, within 5 nucleotides of the 3′ end of the targeting domain, or within a region that is more than 5 nucleotides away from one or both ends of the targeting domain.

[0297] Modifications in the targeting domain can be selected to not interfere with targeting efficacy, which can be evaluated by testing a candidate modification in the system described in Section IV. gRNAs having a candidate targeting domain having a selected length, sequence, degree of complementarity, or degree of modification, can be evaluated in a system in Section IV. The candidate targeting domain can be placed, either alone, or with one or more other candidate changes in a gRNA molecule/Cas molecule (e.g., gRNA molecule/Cas9 molecule) system known to be functional with a selected target and evaluated.

[0298] In some embodiments, all of the modified nucleotides are complementary to and capable of hybridizing to corresponding nucleotides present in the target domain. In other embodiments, 1, 2, 3, 4, 5, 6, 7 or 8 or more modified nucleotides are not complementary to or capable of hybridizing to corresponding nucleotides present in the target domain.

[0299] In an embodiment, the targeting domain comprises, preferably in the 5′→3′ direction: a secondary domain and a core domain. These domains are discussed in more detail below.

[0300] The Core Domain and Secondary Domain of the Targeting Domain

[0301] The “core domain” of the targeting domain is complementary to the “core domain target” on the target nucleic acid. In an embodiment, the core domain comprises about 8 to about 13 nucleotides from the 3′ end of the targeting domain (e.g., the most 3′ 8 to 13 nucleotides of the targeting domain).

[0302] In an embodiment, the secondary domain is absent or optional.

[0303] In an embodiment, the core domain and targeting domain are independently 6+/−2, 7+/−2, 8+/−2, 9+/−2, 10+/−2, 11+/−2, 12+/−2, 13+/−2, 14+/−2, 15+/−2, or 16+−2, nucleotides in length.

[0304] In an embodiment, the core domain and targeting domain are independently 10+/−2 nucleotides in length.

[0305] In an embodiment, the core domain and targeting domain are independently 10+/−4 nucleotides in length.

[0306] In an embodiment, the core domain and targeting domain are independently 6, 7, 8, 9, 10, 11, 12, 13, 14, 15 or 16 nucleotides in length.

[0307] In an embodiment, the core and targeting domain are independently 3 to 20, 4 to 20, 5 to 20, 6 to 20, 7 to 20, 8 to 20, 9 to 20 10 to 20 or 15 to 20 nucleotides in length.

[0308] In an embodiment, the core and targeting domain, are independently 3 to 15, e.g., 6 to 15, 7 to 14, 7 to 13, 6 to 12, 7 to 12, 7 to 11, 7 to 10, 8 to 14, 8 to 13, 8 to 12, 8 to 11, 8 to 10 or 8 to 9 nucleotides in length.

[0309] The core domain is complementary with the core domain target. Typically the core domain has exact complementarity with the core domain target. In some embodiments, the core domain can have 1, 2, 3, 4 or 5 nucleotides that are not complementary with the corresponding nucleotide of the core domain. In an embodiment, the degree of complementarity, together with other properties of the gRNA, is sufficient to allow targeting of a Cas molecule (e.g., Cas9 molecule) to the target nucleic acid.

[0310] The “secondary domain” of the targeting domain of the gRNA is complementary to the “secondary domain target” of the target nucleic acid.

[0311] In an embodiment, the secondary domain is positioned 5′ to the core domain.

[0312] In an embodiment, the secondary domain is absent or optional.

[0313] In an embodiment, if the targeting domain is 26 nucleotides in length and the core domain (counted from the 3′ end of the targeting domain) is 8 to 13 nucleotides in length, the secondary domain is 12 to 17 nucleotides in length.

[0314] In an embodiment, if the targeting domain is 25 nucleotides in length and the core domain (counted from the 3′ end of the targeting domain) is 8 to 13 nucleotides in length, the secondary domain is 12 to 17 nucleotides in length.

[0315] In an embodiment, if the targeting domain is 24 nucleotides in length and the core domain (counted from the 3′ end of the targeting domain) is 8 to 13 nucleotides in length, the secondary domain is 11 to 16 nucleotides in length.

[0316] In an embodiment, if the targeting domain is 23 nucleotides in length and the core domain (counted from the 3′ end of the targeting domain) is 8 to 13 nucleotides in length, the secondary domain is 10 to 15 nucleotides in length.

[0317] In an embodiment, if the targeting domain is 22 nucleotides in length and the core domain (counted from the 3′ end of the targeting domain) is 8 to 13 nucleotides in length, the secondary domain is 9 to 14 nucleotides in length.

[0318] In an embodiment, if the targeting domain is 21 nucleotides in length and the core domain (counted from the 3′ end of the targeting domain) is 8 to 13 nucleotides in length, the secondary domain is 8 to 13 nucleotides in length.

[0319] In an embodiment, if the targeting domain is 20 nucleotides in length and the core domain (counted from the 3′ end of the targeting domain) is 8 to 13 nucleotides in length, the secondary domain is 7 to 12 nucleotides in length.

[0320] In an embodiment, if the targeting domain is 19 nucleotides in length and the core domain (counted from the 3′ end of the targeting domain) is 8 to 13 nucleotides in length, the secondary domain is 6 to 11 nucleotides in length.

[0321] In an embodiment, if the targeting domain is 18 nucleotides in length and the core domain (counted from the 3′ end of the targeting domain) is 8 to 13 nucleotides in length, the secondary domain is 5 to 10 nucleotides in length.

[0322] In an embodiment, if the targeting domain is 17 nucleotides in length and the core domain (counted from the 3′ end of the targeting domain) is 8 to 13 nucleotides in length, the secondary domain is 4 to 9 nucleotides in length.

[0323] In an embodiment, if the targeting domain is 16 nucleotides in length and the core domain (counted from the 3′ end of the targeting domain) is 8 to 13 nucleotides in length, the secondary domain is 3 to 8 nucleotides in length.

[0324] In an embodiment, the secondary domain is 0, 1, 2, 3, 4, 5, 6, 7, 8, 9, 10, 11, 12, 13, 14 or 15 nucleotides in length.

[0325] The secondary domain is complementary with the secondary domain target. Typically the secondary domain has exact complementarity with the secondary domain target. In some embodiments the secondary domain can have 1, 2, 3, 4 or 5 nucleotides that are not complementary with the corresponding nucleotide of the secondary domain. In an embodiment, the degree of complementarity, together with other properties of the gRNA, is sufficient to allow targeting of a Cas9 molecule to the target nucleic acid.

[0326] In an embodiment, the core domain nucleotides do not comprise modifications, e.g., modifications of the type provided in Section VIII. However, in an embodiment, the core domain comprises one or more modifications, e.g., modifications that render it less susceptible to degradation or more bio-compatible, e.g., less immunogenic. By way of example, the backbone of the core domain can be modified with a phosphorothioate, or other modification(s) from Section VIII. In an embodiment a nucleotide of the core domain can comprise a 2′ modification (e.g., a modification at the 2′ position on ribose), e.g., a 2-acetylation, e.g., a 2′ methylation, or other modification(s) from Section VIII. Typically, a core domain will contain no more than 1, 2, or 3 modifications.

[0327] Modifications in the core domain can be selected to not interfere with targeting efficacy, which can be evaluated by testing a candidate modification in the system described in Section IV. gRNAs having a candidate core domain having a selected length, sequence, degree of complementarity, or degree of modification, can be evaluated in the system described at Section IV. The candidate core domain can be placed, either alone, or with one or more other candidate changes in a gRNA molecule/Cas molecule (e.g., gRNA molecule/Cas9 molecule) system known to be functional with a selected target and evaluated.

[0328] In an embodiment, the secondary domain nucleotides do not comprise modifications, e.g., modifications of the type provided in Section VIII. However, in an embodiment, the secondary domain comprises one or more modifications, e.g., modifications that render it less susceptible to degradation or more bio-compatible, e.g., less immunogenic. By way of example, the backbone of the secondary domain can be modified with a phosphorothioate, or other modification(s) from Section VIII. In an embodiment a nucleotide of the secondary domain can comprise a 2′ modification, e.g., a 2-acetylation, e.g., a 2′ methylation, or other modification(s) from Section VIII. Typically, a secondary domain will contain no more than 1, 2, or 3 modifications.

[0329] Modifications in the secondary domain can be selected to not interfere with targeting efficacy, which can be evaluated by testing a candidate modification in the system described in Section IV. gRNAs having a candidate secondary domain having a selected length, sequence, degree of complementarity, or degree of modification, can be evaluated in the system described at Section IV. The candidate secondary domain can be placed, either alone, or with one or more other candidate changes in a gRNA molecule/Cas molecule (e.g., gRNA molecule/Cas9 molecule) system known to be functional with a selected target and evaluated.

[0330] In an embodiment, (1) the degree of complementarity between the core domain and its target, and (2) the degree of complementarity between the secondary domain and its target, may differ. In an embodiment, (1) may be greater than (2). In an embodiment, (1) may be less than (2). In an embodiment, (1) and (2) are the same, e.g., each may be completely complementary with its target.

[0331] In an embodiment, (1) the number of modifications (e.g., modifications from Section VIII) of the nucleotides of the core domain and (2) the number of modification (e.g., modifications from Section VIII) of the nucleotides of the secondary domain, may differ. In an embodiment, (1) may be less than (2). In an embodiment, (1) may be greater than (2). In an embodiment, (1) and (2) may be the same, e.g., each may be free of modifications.

[0332] The First and Second Complementarity Domains

[0333] The first complementarity domain is complementary with the second complementarity domain.

[0334] Typically the first complementarity domain does not have exact complementarity with the second complementarity domain target. In some embodiments, the first complementarity domain can have 1, 2, 3, 4 or 5 nucleotides that are not complementary with the corresponding nucleotide of the second complementarity domain. In an embodiment, 1, 2, 3, 4, 5 or 6, e.g., 3 nucleotides, will not pair in the duplex, and, e.g., form a non-duplexed or looped-out region. In an embodiment, an unpaired, or loop-out, region, e.g., a loop-out of 3 nucleotides, is present on the second complementarity domain. In an embodiment, the unpaired region begins 1, 2, 3, 4, 5, or 6, e.g., 4, nucleotides from the 5′ end of the second complementarity domain.

[0335] In an embodiment, the degree of complementarity, together with other properties of the gRNA, is sufficient to allow targeting of a Cas9 molecule to the target nucleic acid.

[0336] In an embodiment, the first and second complementarity domains are:

[0337] independently, 6+/−2, 7+/−2, 8+/−2, 9+/−2, 10+/−2, 11+/−2, 12+/−2, 13+/−2, 14+/−2, 15+/−2, 16+/−2, 17+/−2, 18+/−2, 19+/−2, or 20+/−2, 21+/−2, 22+/−2, 23+/−2, or 24+/−2 nucleotides in length;

[0338] independently, 6, 7, 8, 9, 10, 11, 12, 13, 14, 14, 16, 17, 18, 19, 20, 21, 22, 23, 24, 25, or 26, nucleotides in length; or

[0339] independently, 5 to 24, 5 to 23, 5 to 22, 5 to 21, 5 to 20, 7 to 18, 9 to 16, or 10 to 14 nucleotides in length.

[0340] In an embodiment, the second complementarity domain is longer than the first complementarity domain, e.g., 2, 3, 4, 5, or 6, e.g., 6, nucleotides longer.

[0341] In an embodiment, the first and second complementary domains, independently, do not comprise modifications, e.g., modifications of the type provided in Section VIII.

[0342] In an embodiment, the first and second complementary domains, independently, comprise one or more modifications, e.g., modifications that the render the domain less susceptible to degradation or more bio-compatible, e.g., less immunogenic. By way of example, the backbone of the domain can be modified with a phosphorothioate, or other modification(s) from Section VIII. In an embodiment a nucleotide of the domain can comprise a 2′ modification, e.g., a 2-acetylation, e.g., a 2′ methylation, or other modification(s) from Section VIII.

[0343] In an embodiment, the first and second complementary domains, independently, include 1, 2, 3, 4, 5, 6, 7 or 8 or more modifications. In an embodiment, the first and second complementary domains, independently, include 1, 2, 3, or 4 modifications within 5 nucleotides of its 5′ end. In an embodiment, the first and second complementary domains, independently, include as many as 1, 2, 3, or 4 modifications within 5 nucleotides of its 3′ end.

[0344] In an embodiment, the first and second complementary domains, independently, include modifications at two consecutive nucleotides, e.g., two consecutive nucleotides that are within 5 nucleotides of the 5′ end of the domain, within 5 nucleotides of the 3′ end of the domain, or more than 5 nucleotides away from one or both ends of the domain. In an embodiment, the first and second complementary domains, independently, include no two consecutive nucleotides that are modified, within 5 nucleotides of the 5′ end of the domain, within 5 nucleotides of the 3′ end of the domain, or within a region that is more than 5 nucleotides away from one or both ends of the domain. In an embodiment, the first and second complementary domains, independently, include no nucleotide that is modified within 5 nucleotides of the 5′ end of the domain, within 5 nucleotides of the 3′ end of the domain, or within a region that is more than 5 nucleotides away from one or both ends of the domain.

[0345] Modifications in a complementarity domain can be selected to not interfere with targeting efficacy, which can be evaluated by testing a candidate modification in the system described in Section IV. gRNAs having a candidate complementarity domain having a selected length, sequence, degree of complementarity, or degree of modification, can be evaluated in the system described in Section IV. The candidate complementarity domain can be placed, either alone, or with one or more other candidate changes in a gRNA molecule/Cas molecule (e.g., gRNA molecule/Cas9 molecule) system known to be functional with a selected target and evaluated.

[0346] In an embodiment, the first complementarity domain has at least 60, 70, 80, 85%, 90% or 95% homology with, or differs by no more than 1, 2, 3, 4, 5, or 6 nucleotides from, a reference first complementarity domain, e.g., a naturally occurring, e.g., an S. pyogenes, S. aureus, N. meningtidis, or S. thermophilus, first complementarity domain, or a first complementarity domain described herein, e.g., from FIGS. 1A-1G.

[0347] In an embodiment, the second complementarity domain has at least 60, 70, 80, 85%, 90%, or 95% homology with, or differs by no more than 1, 2, 3, 4, 5, or 6 nucleotides from, a reference second complementarity domain, e.g., a naturally occurring, e.g., an S. pyogenes, S. aureus, N. meningtidis, or S. thermophilus, second complementarity domain, or a second complementarity domain described herein, e.g., from FIGS. 1A-1G.

[0348] The duplexed region formed by first and second complementarity domains is typically 6, 7, 8, 9, 10, 11, 12, 13, 14, 15, 16, 17, 18, 19, 20, 21 or 22 base pairs in length (excluding any looped out or unpaired nucleotides).

[0349] In some embodiments, the first and second complementarity domains, when duplexed, comprise 11 paired nucleotides, for example, in the gRNA sequence (one paired strand underlined, one bolded):

(SEQ ID NO: 5)

NNNNNNNNNNNNNNNNNNNNGUUUUAGAGCUAGAAAUAGCAAGUUAAAAU
AAGGCUAGUCCGUUAUCAACUUGAAAAAGUGGCACCGAGUCGGUGC.

[0350] In some embodiments, the first and second complementarity domains, when duplexed, comprise 15 paired nucleotides, for example in the gRNA sequence (one paired strand underlined, one bolded):

(SEQ ID NO: 27)

NNNNNNNNNNNNNNNNNNNNGUUUUAGAGCUAUGCUGAAAAGCAUAGCAA
GUUAAAAUAAGGCUAGUCCGUUAUCAACUUGAAAAAGUGGCACCGAGUCG
GUGC.

[0351] In some embodiments the first and second complementarity domains, when duplexed, comprise 16 paired nucleotides, for example in the gRNA sequence (one paired strand underlined, one bolded):

(SEQ ID NO: 28)

NNNNNNNNNNNNNNNNNNNNGUUUUAGAGCUAUGCUGGAAACAGCAUAGC
AAGUUAAAAUAAGGCUAGUCCGUUAUCAACUUGAAAAAGUGGCACCGAGU
CGGUGC.

[0352] In some embodiments the first and second complementarity domains, when duplexed, comprise 21 paired nucleotides, for example in the gRNA sequence (one paired strand underlined, one bolded):

(SEQ ID NO: 29)

NNNNNNNNNNNNNNNNNNNNGUUUUAGAGCUAUGCUGUUUUGGAAACAAA
ACAGCAUAGCAAGUUAAAAUAAGGCUAGUCCGUUAUCAACUUGAAAAAGU
GGCACCGAGUCGGUGC.

[0353] In some embodiments, nucleotides are exchanged to remove poly-U tracts, for example in the gRNA sequences (exchanged nucleotides underlined):

(SEQ ID NO: 30)

NNNNNNNNNNNNNNNNNNNNGUAUUAGAGCUAGAAAUAGCAAGUUAAUAU
AAGGCUAGUCCGUUAUCAACUUGAAAAAGUGGCACCGAGUCGGUGC;

(SEQ ID NO: 31)

NNNNNNNNNNNNNNNNNNNNGUUUAAGAGCUAGAAAUAGCAAGUUUAAAU
AAGGCUAGUCCGUUAUCAACUUGAAAAAGUGGCACCGAGUCGGUGC;
and

(SEQ ID NO: 32)

NNNNNNNNNNNNNNNNNNNNGUAUUAGAGCUAUGCUGUAUUGGAAACAAU
ACAGCAUAGCAAGUUAAUAUAAGGCUAGUCCGUUAUCAACUUGAAAAAGU
GGCACCGAGUCGGUGC.

[0354] The 5′ Extension Domain

[0355] In an embodiment, a modular gRNA can comprise additional sequence, 5′ to the second complementarity domain. In an embodiment, the 5′ extension domain is 2 to 10, 2 to 9, 2 to 8, 2 to 7, 2 to 6, 2 to 5, or 2 to 4 nucleotides in length. In an embodiment, the 5′ extension domain is 2, 3, 4, 5, 6, 7, 8, 9, or 10 or more nucleotides in length.

[0356] In an embodiment, the 5′ extension domain nucleotides do not comprise modifications, e.g., modifications of the type provided in Section VIII. However, in an embodiment, the 5′ extension domain comprises one or more modifications, e.g., modifications that render it less susceptible to degradation or more bio-compatible, e.g., less immunogenic. By way of example, the backbone of the 5′ extension domain can be modified with a phosphorothioate, or other modification(s) from Section VIII. In an embodiment, a nucleotide of the 5′ extension domain can comprise a 2′ modification, e.g., a 2-acetylation, e.g., a 2′ methylation, or other modification(s) from Section VIII.

[0357] In some embodiments, the 5′ extension domain can comprise as many as 1, 2, 3, 4, 5, 6, 7 or 8 modifications. In an embodiment, the 5′ extension domain comprises as many as 1, 2, 3, or 4 modifications within 5 nucleotides of its 5′ end, e.g., in a modular gRNA molecule. In an embodiment, the 5′ extension domain comprises as many as 1, 2, 3, or 4 modifications within 5 nucleotides of its 3′ end, e.g., in a modular gRNA molecule.

[0358] In some embodiments, the 5′ extension domain comprises modifications at two consecutive nucleotides, e.g., two consecutive nucleotides that are within 5 nucleotides of the 5′ end of the 5′ extension domain, within 5 nucleotides of the 3′ end of the 5′ extension domain, or more than 5 nucleotides away from one or both ends of the 5′ extension domain. In an embodiment, no two consecutive nucleotides are modified within 5 nucleotides of the 5′ end of the 5′ extension domain, within 5 nucleotides of the 3′ end of the 5′ extension domain, or within a region that is more than 5 nucleotides away from one or both ends of the 5′ extension domain. In an embodiment, no nucleotide is modified within 5 nucleotides of the 5′ end of the 5′ extension domain, within 5 nucleotides of the 3′ end of the 5′ extension domain, or within a region that is more than 5 nucleotides away from one or both ends of the 5′ extension domain.

[0359] Modifications in the 5′ extension domain can be selected to not interfere with gRNA molecule efficacy, which can be evaluated by testing a candidate modification in the system described in Section IV. gRNAs having a candidate 5′ extension domain having a selected length, sequence, degree of complementarity, or degree of modification, can be evaluated in the system described at Section IV. The candidate 5′ extension domain can be placed, either alone, or with one or more other candidate changes in a gRNA molecule/Cas molecule (e.g., gRNA molecule/Cas9 molecule) system known to be functional with a selected target and evaluated.

[0360] In an embodiment, the 5′ extension domain has at least 60, 70, 80, 85, 90, 95, 98 or 99% homology with, or differs by no more than 1, 2, 3, 4, 5, or 6 nucleotides from, a reference 5′ extension domain, e.g., a naturally occurring, e.g., an S. pyogenes, S. aureus, N. meningtidis, or S. thermophilus, 5′ extension domain, or a 5′ extension domain described herein, e.g., from FIGS. 1A-1G.

[0361] The Linking Domain

[0362] In a unimolecular gRNA molecule the linking domain is disposed between the first and second complementarity domains. In a modular gRNA molecule, the two molecules are associated with one another by the complementarity domains.

[0363] In an embodiment, the linking domain is 10+/−5, 20+/−5, 30+/−5, 40+/−5, 50+/−5, 60+/−5, 70+/−5, 80+/−5, 90+/−5, or 100+/−5 nucleotides, in length.

[0364] In an embodiment, the linking domain is 20+/−10, 30+/−10, 40+/−10, 50+/−10, 60+/−10, 70+/−10, 80+/−10, 90+/−10, or 100+/−10 nucleotides, in length.

[0365] In an embodiment, the linking domain is 10 to 100, 10 to 90, 10 to 80, 10 to 70, 10 to 60, 10 to 50, 10 to 40, 10 to 30, 10 to 20 or 10 to 15 nucleotides in length. In other embodiments, the linking domain is 20 to 100, 20 to 90, 20 to 80, 20 to 70, 20 to 60, 20 to 50, 20 to 40, 20 to 30, or 20 to 25 nucleotides in length.

[0366] In an embodiment, the linking domain is 1, 2, 3, 4, 5, 6, 7, 8, 9, 10, 11, 12, 13, 14, 15, 16 17, 18, 19, or 20 nucleotides in length.

[0367] In an embodiment, the linking domain is a covalent bond.

[0368] In an embodiment, the linking domain comprises a duplexed region, typically adjacent to or within 1, 2, or 3 nucleotides of the 3′ end of the first complementarity domain and/or the 5-end of the second complementarity domain. In an embodiment, the duplexed region can be 20+/−10 base pairs in length. In an embodiment, the duplexed region can be 10+/−5, 15+/−5, 20+/−5, or 30+/−5 base pairs in length. In an embodiment, the duplexed region can be 1, 2, 3, 4, 5, 6, 7, 8, 9, 10, 11, 12, 13, 14, or 15 base pairs in length.

[0369] Typically the sequences forming the duplexed region have exact complementarity with one another, though in some embodiments as many as 1, 2, 3, 4, 5, 6, 7 or 8 nucleotides are not complementary with the corresponding nucleotides.

[0370] In an embodiment, the linking domain nucleotides do not comprise modifications, e.g., modifications of the type provided in Section VIII. However, in an embodiment, the linking domain comprises one or more modifications, e.g., modifications that render it less susceptible to degradation or more bio-compatible, e.g., less immunogenic. By way of example, the backbone of the linking domain can be modified with a phosphorothioate, or other modification(s) from Section VIII. In an embodiment a nucleotide of the linking domain can comprise a 2′ modification, e.g., a 2-acetylation, e.g., a 2′ methylation, or other modification(s) from Section VIII. In some embodiments, the linking domain can comprise as many as 1, 2, 3, 4, 5, 6, 7 or 8 modifications.

[0371] Modifications in a linking domain can be selected to not interfere with targeting efficacy, which can be evaluated by testing a candidate modification in the system described in Section IV. gRNAs having a candidate linking domain having a selected length, sequence, degree of complementarity, or degree of modification, can be evaluated a system described in Section IV. A candidate linking domain can be placed, either alone, or with one or more other candidate changes in a gRNA molecule/Cas molecule (e.g., gRNA molecule/Cas9 molecule) system known to be functional with a selected target and evaluated.

[0372] In an embodiment, the linking domain has at least 60, 70, 80, 85, 90, 95, 98 or 99% homology with, or differs by no more than 1, 2, 3, 4, 5, or 6 nucleotides from, a reference linking domain, e.g., a linking domain described herein, e.g., from FIGS. 1A-1G.

[0373] The Proximal Domain

[0374] In an embodiment, the proximal domain is 6+/−2, 7+/−2, 8+/−2, 9+/−2, 10+/−2, 11+/−2, 12+/−2, 13+/−2, 14+/−2, 14+/−2, 16+/−2, 17+/−2, 18+/−2, 19+/−2, or 20+/−2 nucleotides in length.

[0375] In an embodiment, the proximal domain is 6, 7, 8, 9, 10, 11, 12, 13, 14, 14, 16, 17, 18, 19, or 20 nucleotides in length.

[0376] In an embodiment, the proximal domain is 5 to 20, 7, to 18, 9 to 16, or 10 to 14 nucleotides in length.

[0377] In an embodiment, the proximal domain nucleotides do not comprise modifications, e.g., modifications of the type provided in Section VIII. However, in an embodiment, the proximal domain comprises one or more modifications, e.g., modifications that render it less susceptible to degradation or more bio-compatible, e.g., less immunogenic. By way of example, the backbone of the proximal domain can be modified with a phosphorothioate, or other modification(s) from Section VIII. In an embodiment a nucleotide of the proximal domain can comprise a 2′ modification, e.g., a 2-acetylation, e.g., a 2′ methylation, or other modification(s) from Section VIII.

[0378] In some embodiments, the proximal domain can comprise as many as 1, 2, 3, 4, 5, 6, 7 or 8 modifications. In an embodiment, the proximal domain comprises as many as 1, 2, 3, or 4 modifications within 5 nucleotides of its 5′ end, e.g., in a modular gRNA molecule. In an embodiment, the target domain comprises as many as 1, 2, 3, or 4 modifications within 5 nucleotides of its 3′ end, e.g., in a modular gRNA molecule.

[0379] In some embodiments, the proximal domain comprises modifications at two consecutive nucleotides, e.g., two consecutive nucleotides that are within 5 nucleotides of the 5′ end of the proximal domain, within 5 nucleotides of the 3′ end of the proximal domain, or more than 5 nucleotides away from one or both ends of the proximal domain. In an embodiment, no two consecutive nucleotides are modified within 5 nucleotides of the 5′ end of the proximal domain, within 5 nucleotides of the 3′ end of the proximal domain, or within a region that is more than 5 nucleotides away from one or both ends of the proximal domain. In an embodiment, no nucleotide is modified within 5 nucleotides of the 5′ end of the proximal domain, within 5 nucleotides of the 3′ end of the proximal domain, or within a region that is more than 5 nucleotides away from one or both ends of the proximal domain.

[0380] Modifications in the proximal domain can be selected to not interfere with gRNA molecule efficacy, which can be evaluated by testing a candidate modification in the system described in Section IV. gRNAs having a candidate proximal domain having a selected length, sequence, degree of complementarity, or degree of modification, can be evaluated in the system described at Section IV. The candidate proximal domain can be placed, either alone, or with one or more other candidate changes in a gRNA molecule/Cas molecule (e.g., gRNA molecule/Cas9 molecule) system known to be functional with a selected target and evaluated.

[0381] In an embodiment, the proximal domain has at least 60, 70, 80, 85 90, 95, 98 or 99% homology with, or differs by no more than 1, 2, 3, 4, 5, or 6 nucleotides from, a reference proximal domain, e.g., a naturally occurring, e.g., an S. pyogenes, S. aureus, N. meningtidis, or S. thermophilus, proximal domain, or a proximal domain described herein, e.g., from FIGS. 1A-1G.

[0382] The Tail Domain

[0383] In an embodiment, the tail domain is 10+/−5, 20+/−5, 30+/−5, 40+/−5, 50+/−5, 60+/−5, 70+/−5, 80+/−5, 90+/−5, or 100+/−5 nucleotides, in length.

[0384] In an embodiment, the tail domain is 20+/−5 nucleotides in length.

[0385] In an embodiment, the tail domain is 20+/−10, 30+/−10, 40+/−10, 50+/−10, 60+/−10, 70+/−10, 80+/−10, 90+/−10, or 100+/−10 nucleotides, in length.

[0386] In an embodiment, the tail domain is 25+/−10 nucleotides in length.

[0387] In an embodiment, the tail domain is 10 to 100, 10 to 90, 10 to 80, 10 to 70, 10 to 60, 10 to 50, 10 to 40, 10 to 30, 10 to 20 or 10 to 15 nucleotides in length.

[0388] In other embodiments, the tail domain is 20 to 100, 20 to 90, 20 to 80, 20 to 70, 20 to 60, 20 to 50, 20 to 40, 20 to 30, or 20 to 25 nucleotides in length.

[0389] In an embodiment, the tail domain is 1 to 20, 1 to 1, 1 to 10, or 1 to 5 nucleotides in length.

[0390] In an embodiment, the tail domain nucleotides do not comprise modifications, e.g., modifications of the type provided in Section VIII. However, in an embodiment, the tail domain comprises one or more modifications, e.g., modifications that render it less susceptible to degradation or more bio-compatible, e.g., less immunogenic. By way of example, the backbone of the tail domain can be modified with a phosphorothioate, or other modification(s) from Section VIII. In an embodiment a nucleotide of the tail domain can comprise a 2′ modification, e.g., a 2-acetylation, e.g., a 2′ methylation, or other modification(s) from Section VIII.

[0391] In some embodiments, the tail domain can have as many as 1, 2, 3, 4, 5, 6, 7 or 8 modifications. In an embodiment, the target domain comprises as many as 1, 2, 3, or 4 modifications within 5 nucleotides of its 5′ end. In an embodiment, the target domain comprises as many as 1, 2, 3, or 4 modifications within 5 nucleotides of its 3′ end.

[0392] In an embodiment, the tail domain comprises a tail duplex domain, which can form a tail duplexed region. In an embodiment, the tail duplexed region can be 3, 4, 5, 6, 7, 8, 9, 10, 11, or 12 base pairs in length. In an embodiment, a further single stranded domain, exists 3′ to the tail duplexed domain. In an embodiment, this domain is 3, 4, 5, 6, 7, 8, 9, or 10 nucleotides in length. In an embodiment it is 4 to 6 nucleotides in length.

[0393] In an embodiment, the tail domain has at least 60, 70, 80, 90, 95, 98 or 99% homology with, or differs by no more than 1, 2, 3, 4, 5, or 6 nucleotides from, a reference tail domain, e.g., a naturally occurring, e.g., an S. pyogenes, S. aureus, N. meningtidis, or S. thermophilus, tail domain, or a tail domain described herein, e.g., from FIGS. 1A-1G.

[0394] In an embodiment, the proximal and tail domain, taken together comprise the following sequences:

(SEQ ID NO: 33)

AAGGCUAGUCCGUUAUCAACUUGAAAAAGUGGCACCGAGUCGGUGCU,

(SEQ ID NO: 34)

AAGGCUAGUCCGUUAUCAACUUGAAAAAGUGGCACCGAGUCGGUGGUGC,

(SEQ ID NO: 35)

AAGGCUAGUCCGUUAUCAACUUGAAAAAGUGGCACCGAGUCGGUGCGGAU
C,

(SEQ ID NO: 36)

AAGGCUAGUCCGUUAUCAACUUGAAAAAGUG,

(SEQ ID NO: 37)

AAGGCUAGUCCGUUAUCA,
or

(SEQ ID NO: 38)

AAGGCUAGUCCG.

[0395] In an embodiment, the tail domain comprises the 3′ sequence UUUUUU, e.g., if a U6 promoter is used for transcription.

[0396] In an embodiment, the tail domain comprises the 3′ sequence UUUU, e.g., if an H1 promoter is used for transcription.

[0397] In an embodiment, tail domain comprises variable numbers of 3′ Us depending, e.g., on the termination signal of the pol-III promoter used.

[0398] In an embodiment, the tail domain comprises variable 3′ sequence derived from the DNA template if a T7 promoter is used.

[0399] In an embodiment, the tail domain comprises variable 3′ sequence derived from the DNA template, e.g., if in vitro transcription is used to generate the RNA molecule.

[0400] In an embodiment, the tail domain comprises variable 3′ sequence derived from the DNA template, e.g., if a pol-II promoter is used to drive transcription.

[0401] Modifications in the tail domain can be selected to not interfere with targeting efficacy, which can be evaluated by testing a candidate modification in the system described in Section IV. gRNAs having a candidate tail domain having a selected length, sequence, degree of complementarity, or degree of modification, can be evaluated in the system described in Section IV. The candidate tail domain can be placed, either alone, or with one or more other candidate changes in a gRNA molecule/Cas molecule (e.g., gRNA molecule/Cas9 molecule) system known to be functional with a selected target and evaluated.

[0402] In some embodiments, the tail domain comprises modifications at two consecutive nucleotides, e.g., two consecutive nucleotides that are within 5 nucleotides of the 5′ end of the tail domain, within 5 nucleotides of the 3′ end of the tail domain, or more than 5 nucleotides away from one or both ends of the tail domain. In an embodiment, no two consecutive nucleotides are modified within 5 nucleotides of the 5′ end of the tail domain, within 5 nucleotides of the 3′ end of the tail domain, or within a region that is more than 5 nucleotides away from one or both ends of the tail domain. In an embodiment, no nucleotide is modified within 5 nucleotides of the 5′ end of the tail domain, within 5 nucleotides of the 3′ end of the tail domain, or within a region that is more than 5 nucleotides away from one or both ends of the tail domain.

[0403] In an embodiment a gRNA has the following structure:

[0404] 5′ [targeting domain]-[first complementarity domain]-[linking domain]-[second complementarity domain]-[proximal domain]-[tail domain]-3′

[0405] wherein, the targeting domain comprises a core domain and optionally a secondary domain, and is 10 to 50 nucleotides in length;

[0406] the first complementarity domain is 5 to 25 nucleotides in length and, In an embodiment has at least 50, 60, 70, 80, 85, 90, 95, 98 or 99% homology with a reference first complementarity domain disclosed herein;

[0407] the linking domain is 1 to 5 nucleotides in length;

[0408] the proximal domain is 5 to 20 nucleotides in length and, in an embodiment has at least 50, 60, 70, 80, 85, 90, 95, 98 or 99% homology with a reference proximal domain disclosed herein; and

[0409] the tail domain is absent or a nucleotide sequence is 1 to 50 nucleotides in length and, in an embodiment has at least 50, 60, 70, 80, 85, 90, 95, 98 or 99% homology with a reference tail domain disclosed herein.

[0410] Exemplary Chimeric gRNAs

[0411] In an embodiment, a unimolecular, or chimeric, gRNA comprises, preferably from 5′ to 3′:
[0412] a targeting domain, e.g., comprising 15, 16, 17, 18, 19, 20, 21, 22, 23, 24, 25, or 26 nucleotides (which is complementary to a target nucleic acid);
[0413] a first complementarity domain;
[0414] a linking domain;
[0415] a second complementarity domain (which is complementary to the first complementarity domain);
[0416] a proximal domain; and
[0417] a tail domain,
[0418] wherein,
[0419] (a) the proximal and tail domain, when taken together, comprise at least 15, 18, 20, 25, 30, 31, 35, 40, 45, 49, 50, or 53 nucleotides;
[0420] (b) there are at least 15, 18, 20, 25, 30, 31, 35, 40, 45, 49, 50, or 53 nucleotides 3′ to the last nucleotide of the second complementarity domain; or
[0421] (c) there are at least 16, 19, 21, 26, 31, 32, 36, 41, 46, 50, 51, or 54 nucleotides 3′ to the last nucleotide of the second complementarity domain that is complementary to its corresponding nucleotide of the first complementarity domain.

[0422] In an embodiment, the sequence from (a), (b), or (c), has at least 60, 75, 80, 85, 90, 95, or 99% homology with the corresponding sequence of a naturally occurring gRNA, or with a gRNA described herein.

[0423] In an embodiment, the proximal and tail domain, when taken together, comprise at least 15, 18, 20, 25, 30, 31, 35, 40, 45, 49, 50, or 53 nucleotides.

[0424] In an embodiment, there are at least 15, 18, 20, 25, 30, 31, 35, 40, 45, 49, 50, or 53 nucleotides 3′ to the last nucleotide of the second complementarity domain.

[0425] In an embodiment, there are at least 16, 19, 21, 26, 31, 32, 36, 41, 46, 50, 51, or 54 nucleotides 3′ to the last nucleotide of the second complementarity domain that is complementary to its corresponding nucleotide of the first complementarity domain.

[0426] In an embodiment, the targeting domain comprises, has, or consists of, 16, 17, 18, 19, 20, 21, 22, 23, 24, 25 or 26 nucleotides (e.g., 16, 17, 18, 19, 20, 21, 22, 23, 24, 25 or 26 consecutive nucleotides) having complementarity with the target domain, e.g., the targeting domain is 16, 17, 18, 19, 20, 21, 22, 23, 24, 25 or 26 nucleotides in length.

[0427] In an embodiment, the targeting domain comprises, has, or consists of, 16 nucleotides (e.g., 16 consecutive nucleotides) having complementarity with the target domain, e.g., the targeting domain is 16 nucleotides in length.

[0428] In an embodiment, the targeting domain comprises, has, or consists of, 17 nucleotides (e.g., 17 consecutive nucleotides) having complementarity with the target domain, e.g., the targeting domain is 17 nucleotides in length.

[0429] In an embodiment, the targeting domain comprises, has, or consists of, 18 nucleotides (e.g., 18 consecutive nucleotides) having complementarity with the target domain, e.g., the targeting domain is 18 nucleotides in length.

[0430] In an embodiment, the targeting domain comprises, has, or consists of, 19 nucleotides (e.g., 19 consecutive nucleotides) having complementarity with the target domain, e.g., the targeting domain is 19 nucleotides in length.

[0431] In an embodiment, the targeting domain comprises, has, or consists of, 20 nucleotides (e.g., 20 consecutive nucleotides) having complementarity with the target domain, e.g., the targeting domain is 20 nucleotides in length.

[0432] In an embodiment, the targeting domain comprises, has, or consists of, 21 nucleotides (e.g., 21 consecutive nucleotides) having complementarity with the target domain, e.g., the targeting domain is 21 nucleotides in length.

[0433] In an embodiment, the targeting domain comprises, has, or consists of, 22 nucleotides (e.g., 22 consecutive nucleotides) having complementarity with the target domain, e.g., the targeting domain is 22 nucleotides in length.

[0434] In an embodiment, the targeting domain comprises, has, or consists of, 23 nucleotides (e.g., 23 consecutive nucleotides) having complementarity with the target domain, e.g., the targeting domain is 23 nucleotides in length.

[0435] In an embodiment, the targeting domain comprises, has, or consists of, 24 nucleotides (e.g., 24 consecutive nucleotides) having complementarity with the target domain, e.g., the targeting domain is 24 nucleotides in length.

[0436] In an embodiment, the targeting domain comprises, has, or consists of, 25 nucleotides (e.g., 25 consecutive nucleotides) having complementarity with the target domain, e.g., the targeting domain is 25 nucleotides in length.

[0437] In an embodiment, the targeting domain comprises, has, or consists of, 26 nucleotides (e.g., 26 consecutive nucleotides) having complementarity with the target domain, e.g., the targeting domain is 26 nucleotides in length.

[0438] In an embodiment, the targeting domain comprises, has, or consists of, 16 nucleotides (e.g., 16 consecutive nucleotides) having complementarity with the target domain, e.g., the targeting domain is 16 nucleotides in length; and the proximal and tail domain, when taken together, comprise at least 15, 18, 20, 25, 30, 31, 35, 40, 45, 49, 50, or 53 nucleotides.

[0439] In an embodiment, the targeting domain comprises, has, or consists of, 16 nucleotides (e.g., 16 consecutive nucleotides) having complementarity with the target domain, e.g., the targeting domain is 16 nucleotides in length; and there are at least 15, 18, 20, 25, 30, 31, 35, 40, 45, 49, 50, or 53 nucleotides 3′ to the last nucleotide of the second complementarity domain.

[0440] In an embodiment, the targeting domain comprises, has, or consists of, 16 nucleotides (e.g., 16 consecutive nucleotides) having complementarity with the target domain, e.g., the targeting domain is 16 nucleotides in length; and there are at least 16, 19, 21, 26, 31, 32, 36, 41, 46, 50, 51, or 54 nucleotides 3′ to the last nucleotide of the second complementarity domain that is complementary to its corresponding nucleotide of the first complementarity domain.

[0441] In an embodiment, the targeting domain comprises, has, or consists of, 17 nucleotides (e.g., 17 consecutive nucleotides) having complementarity with the target domain, e.g., the targeting domain is 17 nucleotides in length; and the proximal and tail domain, when taken together, comprise at least 15, 18, 20, 25, 30, 31, 35, 40, 45, 49, 50, or 53 nucleotides.

[0442] In an embodiment, the targeting domain comprises, has, or consists of, 17 nucleotides (e.g., 17 consecutive nucleotides) having complementarity with the target domain, e.g., the targeting domain is 17 nucleotides in length; and there are at least 15, 18, 20, 25, 30, 31, 35, 40, 45, 49, 50, or 53 nucleotides 3′ to the last nucleotide of the second complementarity domain.

[0443] In an embodiment, the targeting domain comprises, has, or consists of, 17 nucleotides (e.g., 17 consecutive nucleotides) having complementarity with the target domain, e.g., the targeting domain is 17 nucleotides in length; and there are at least 16, 19, 21, 26, 31, 32, 36, 41, 46, 50, 51, or 54 nucleotides 3′ to the last nucleotide of the second complementarity domain that is complementary to its corresponding nucleotide of the first complementarity domain.

[0444] In an embodiment, the targeting domain comprises, has, or consists of, 18 nucleotides (e.g., 18 consecutive nucleotides) having complementarity with the target domain, e.g., the targeting domain is 18 nucleotides in length; and the proximal and tail domain, when taken together, comprise at least 15, 18, 20, 25, 30, 31, 35, 40, 45, 49, 50, or 53 nucleotides.

[0445] In an embodiment, the targeting domain comprises, has, or consists of, 18 nucleotides (e.g., 18 consecutive nucleotides) having complementarity with the target domain, e.g., the targeting domain is 18 nucleotides in length; and there are at least 15, 18, 20, 25, 30, 31, 35, 40, 45, 49, 50, or 53 nucleotides 3′ to the last nucleotide of the second complementarity domain.

[0446] In an embodiment, the targeting domain comprises, has, or consists of, 18 nucleotides (e.g., 18 consecutive nucleotides) having complementarity with the target domain, e.g., the targeting domain is 18 nucleotides in length; and there are at least 16, 19, 21, 26, 31, 32, 36, 41, 46, 50, 51, or 54 nucleotides 3′ to the last nucleotide of the second complementarity domain that is complementary to its corresponding nucleotide of the first complementarity domain.

[0447] In an embodiment, the targeting domain comprises, has, or consists of, 19 nucleotides (e.g., 19 consecutive nucleotides) having complementarity with the target domain, e.g., the targeting domain is 19 nucleotides in length; and the proximal and tail domain, when taken together, comprise at least 15, 18, 20, 25, 30, 31, 35, 40, 45, 49, 50, or 53 nucleotides.

[0448] In an embodiment, the targeting domain comprises, has, or consists of, 19 nucleotides (e.g., 19 consecutive nucleotides) having complementarity with the target domain, e.g., the targeting domain is 19 nucleotides in length; and there are at least 15, 18, 20, 25, 30, 31, 35, 40, 45, 49, 50, or 53 nucleotides 3′ to the last nucleotide of the second complementarity domain.

[0449] In an embodiment, the targeting domain comprises, has, or consists of, 19 nucleotides (e.g., 19 consecutive nucleotides) having complementarity with the target domain, e.g., the targeting domain is 19 nucleotides in length; and there are at least 16, 19, 21, 26, 31, 32, 36, 41, 46, 50, 51, or 54 nucleotides 3′ to the last nucleotide of the second complementarity domain that is complementary to its corresponding nucleotide of the first complementarity domain.

[0450] In an embodiment, the targeting domain comprises, has, or consists of, 20 nucleotides (e.g., 20 consecutive nucleotides) having complementarity with the target domain, e.g., the targeting domain is 20 nucleotides in length; and the proximal and tail domain, when taken together, comprise at least 15, 18, 20, 25, 30, 31, 35, 40, 45, 49, 50, or 53 nucleotides.

[0451] In an embodiment, the targeting domain comprises, has, or consists of, 20 nucleotides (e.g., 20 consecutive nucleotides) having complementarity with the target domain, e.g., the targeting domain is 20 nucleotides in length; and there are at least 15, 18, 20, 25, 30, 31, 35, 40, 45, 49, 50, or 53 nucleotides 3′ to the last nucleotide of the second complementarity domain.

[0452] In an embodiment, the targeting domain comprises, has, or consists of, 20 nucleotides (e.g., 20 consecutive nucleotides) having complementarity with the target domain, e.g., the targeting domain is 20 nucleotides in length; and there are at least 16, 19, 21, 26, 31, 32, 36, 41, 46, 50, 51, or 54 nucleotides 3′ to the last nucleotide of the second complementarity domain that is complementary to its corresponding nucleotide of the first complementarity domain.

[0453] In an embodiment, the targeting domain comprises, has, or consists of, 21 nucleotides (e.g., 21 consecutive nucleotides) having complementarity with the target domain, e.g., the targeting domain is 21 nucleotides in length; and the proximal and tail domain, when taken together, comprise at least 15, 18, 20, 25, 30, 31, 35, 40, 45, 49, 50, or 53 nucleotides.

[0454] In an embodiment, the targeting domain comprises, has, or consists of, 21 nucleotides (e.g., 21 consecutive nucleotides) having complementarity with the target domain, e.g., the targeting domain is 21 nucleotides in length; and there are at least 15, 18, 20, 25, 30, 31, 35, 40, 45, 49, 50, or 53 nucleotides 3′ to the last nucleotide of the second complementarity domain.

[0455] In an embodiment, the targeting domain comprises, has, or consists of, 21 nucleotides (e.g., 21 consecutive nucleotides) having complementarity with the target domain, e.g., the targeting domain is 21 nucleotides in length; and there are at least 16, 19, 21, 26, 31, 32, 36, 41, 46, 50, 51, or 54 nucleotides 3′ to the last nucleotide of the second complementarity domain that is complementary to its corresponding nucleotide of the first complementarity domain.

[0456] In an embodiment, the targeting domain comprises, has, or consists of, 22 nucleotides (e.g., 22 consecutive nucleotides) having complementarity with the target domain, e.g., the targeting domain is 22 nucleotides in length; and the proximal and tail domain, when taken together, comprise at least 15, 18, 20, 25, 30, 31, 35, 40, 45, 49, 50, or 53 nucleotides.

[0457] In an embodiment, the targeting domain comprises, has, or consists of, 22 nucleotides (e.g., 22 consecutive nucleotides) having complementarity with the target domain, e.g., the targeting domain is 22 nucleotides in length; and there are at least 15, 18, 20, 25, 30, 31, 35, 40, 45, 49, 50, or 53 nucleotides 3′ to the last nucleotide of the second complementarity domain.

[0458] In an embodiment, the targeting domain comprises, has, or consists of, 22 nucleotides (e.g., 22 consecutive nucleotides) having complementarity with the target domain, e.g., the targeting domain is 22 nucleotides in length; and there are at least 16, 19, 21, 26, 31, 32, 36, 41, 46, 50, 51, or 54 nucleotides 3′ to the last nucleotide of the second complementarity domain that is complementary to its corresponding nucleotide of the first complementarity domain.

[0459] In an embodiment, the targeting domain comprises, has, or consists of, 23 nucleotides (e.g., 23 consecutive nucleotides) having complementarity with the target domain, e.g., the targeting domain is 23 nucleotides in length; and the proximal and tail domain, when taken together, comprise at least 15, 18, 20, 25, 30, 31, 35, 40, 45, 49, 50, or 53 nucleotides.

[0460] In an embodiment, the targeting domain comprises, has, or consists of, 23 nucleotides (e.g., 23 consecutive nucleotides) having complementarity with the target domain, e.g., the targeting domain is 23 nucleotides in length; and there are at least 15, 18, 20, 25, 30, 31, 35, 40, 45, 49, 50, or 53 nucleotides 3′ to the last nucleotide of the second complementarity domain.

[0461] In an embodiment, the targeting domain comprises, has, or consists of, 23 nucleotides (e.g., 23 consecutive nucleotides) having complementarity with the target domain, e.g., the targeting domain is 23 nucleotides in length; and there are at least 16, 19, 21, 26, 31, 32, 36, 41, 46, 50, 51, or 54 nucleotides 3′ to the last nucleotide of the second complementarity domain that is complementary to its corresponding nucleotide of the first complementarity domain.

[0462] In an embodiment, the targeting domain comprises, has, or consists of, 24 nucleotides (e.g., 24 consecutive nucleotides) having complementarity with the target domain, e.g., the targeting domain is 24 nucleotides in length; and the proximal and tail domain, when taken together, comprise at least 15, 18, 20, 25, 30, 31, 35, 40, 45, 49, 50, or 53 nucleotides.

[0463] In an embodiment, the targeting domain comprises, has, or consists of, 24 nucleotides (e.g., 24 consecutive nucleotides) having complementarity with the target domain, e.g., the targeting domain is 24 nucleotides in length; and there are at least 15, 18, 20, 25, 30, 31, 35, 40, 45, 49, 50, or 53 nucleotides 3′ to the last nucleotide of the second complementarity domain.

[0464] In an embodiment, the targeting domain comprises, has, or consists of, 24 nucleotides (e.g., 24 consecutive nucleotides) having complementarity with the target domain, e.g., the targeting domain is 24 nucleotides in length; and there are at least 16, 19, 21, 26, 31, 32, 36, 41, 46, 50, 51, or 54 nucleotides 3′ to the last nucleotide of the second complementarity domain that is complementary to its corresponding nucleotide of the first complementarity domain.

[0465] In an embodiment, the targeting domain comprises, has, or consists of, 25 nucleotides (e.g., 25 consecutive nucleotides) having complementarity with the target domain, e.g., the targeting domain is 25 nucleotides in length; and the proximal and tail domain, when taken together, comprise at least 15, 18, 20, 25, 30, 31, 35, 40, 45, 49, 50, or 53 nucleotides.

[0466] In an embodiment, the targeting domain comprises, has, or consists of, 25 nucleotides (e.g., 25 consecutive nucleotides) having complementarity with the target domain, e.g., the targeting domain is 25 nucleotides in length; and there are at least 15, 18, 20, 25, 30, 31, 35, 40, 45, 49, 50, or 53 nucleotides 3′ to the last nucleotide of the second complementarity domain.

[0467] In an embodiment, the targeting domain comprises, has, or consists of, 25 nucleotides (e.g., 25 consecutive nucleotides) having complementarity with the target domain, e.g., the targeting domain is 25 nucleotides in length; and there are at least 16, 19, 21, 26, 31, 32, 36, 41, 46, 50, 51, or 54 nucleotides 3′ to the last nucleotide of the second complementarity domain that is complementary to its corresponding nucleotide of the first complementarity domain.

[0468] In an embodiment, the targeting domain comprises, has, or consists of, 26 nucleotides (e.g., 26 consecutive nucleotides) having complementarity with the target domain, e.g., the targeting domain is 26 nucleotides in length; and the proximal and tail domain, when taken together, comprise at least 15, 18, 20, 25, 30, 31, 35, 40, 45, 49, 50, or 53 nucleotides.

[0469] In an embodiment, the targeting domain comprises, has, or consists of, 26 nucleotides (e.g., 26 consecutive nucleotides) having complementarity with the target domain, e.g., the targeting domain is 26 nucleotides in length; and there are at least 15, 18, 20, 25, 30, 31, 35, 40, 45, 49, 50, or 53 nucleotides 3′ to the last nucleotide of the second complementarity domain.

[0470] In an embodiment, the targeting domain comprises, has, or consists of, 26 nucleotides (e.g., 26 consecutive nucleotides) having complementarity with the target domain, e.g., the targeting domain is 26 nucleotides in length; and there are at least 16, 19, 21, 26, 31, 32, 36, 41, 46, 50, 51, or 54 nucleotides 3′ to the last nucleotide of the second complementarity domain that is complementary to its corresponding nucleotide of the first complementarity domain.

[0471] In an embodiment, the unimolecular, or chimeric, gRNA molecule (comprising a targeting domain, a first complementary domain, a linking domain, a second complementary domain, a proximal domain and, optionally, a tail domain) comprises the following sequence in which the targeting domain is depicted as 20 Ns but could be any sequence and range in length from 16 to 26 nucleotides and in which the gRNA sequence is followed by 6 Us, which serve as a termination signal for the U6 promoter, but which could be either absent or fewer in number:

(SEQ ID NO: 40)

NNNNNNNNNNNNNNNNNNNNGUUUUAGAGCUAGAAAUAGCAAGUUAAAAU
AAGGCUAGUCCGUUAUCAACUUGAAAAAGUGGCACCGAGUCGGUGCUUUU
UU.

In an embodiment, the unimolecular, or chimeric, gRNA molecule is a S. pyogenes gRNA molecule.

[0472] In some embodiments, the unimolecular, or chimeric, gRNA molecule (comprising a targeting domain, a first complementary domain, a linking domain, a second complementary domain, a proximal domain and, optionally, a tail domain) comprises the following sequence in which the targeting domain is depicted as 20 Ns but could be any sequence and range in length from 16 to 26 nucleotides and in which the gRNA sequence is followed by 6 Us, which serve as a termination signal for the U6 promoter, but which could be either absent or fewer in number:

(SEQ ID NO: 41)

NNNNNNNNNNNNNNNNNNNNGUUUUAGUACUCUGGAAACAGAAUCUACUA
AAACAAGGCAAAAUGCCGUGUUUAUCUCGUCAACUUGUUGGCGAGAUUUU
UU.

In an embodiment, the unimolecular, or chimeric, gRNA molecule is a S. aureus gRNA molecule.

[0473] The sequences and structures of exemplary chimeric gRNAs are also shown in FIGS. 10A-10B.

[0474] Exemplary Modular gRNAs

[0475] In an embodiment, a modular gRNA comprises:
[0476] a first strand comprising, preferably from 5′ to 3′;
   [0477] a targeting domain, e.g., comprising 16, 17, 18, 19, 20, 21, 22, 23, 24, 25, or 26 nucleotides;
   [0478] a first complementarity domain; and
   [0479] a second strand, comprising, preferably from 5′ to 3′:
   [0480] optionally a 5′ extension domain;
   [0481] a second complementarity domain;
   [0482] a proximal domain; and
   [0483] a tail domain,
[0484] wherein:
[0485] (a) the proximal and tail domain, when taken together, comprise at least 15, 18, 20, 25, 30, 31, 35, 40, 45, 49, 50, or 53 nucleotides;
[0486] (b) there are at least 15, 18, 20, 25, 30, 31, 35, 40, 45, 49, 50, or 53 nucleotides 3′ to the last nucleotide of the second complementarity domain; or
[0487] (c) there are at least 16, 19, 21, 26, 31, 32, 36, 41, 46, 50, 51, or 54 nucleotides 3′ to the last nucleotide of the second complementarity domain that is complementary to its corresponding nucleotide of the first complementarity domain.

[0488] In an embodiment, the sequence from (a), (b), or (c), has at least 60, 75, 80, 85, 90, 95, or 99% homology with the corresponding sequence of a naturally occurring gRNA, or with a gRNA described herein.

[0489] In an embodiment, the proximal and tail domain, when taken together, comprise at least 15, 18, 20, 25, 30, 31, 35, 40, 45, 49, 50, or 53 nucleotides.

[0490] In an embodiment there are at least 15, 18, 20, 25, 30, 31, 35, 40, 45, 49, 50, or 53 nucleotides 3′ to the last nucleotide of the second complementarity domain.

[0491] In an embodiment, there are at least 16, 19, 21, 26, 31, 32, 36, 41, 46, 50, 51, or 54 nucleotides 3′ to the last nucleotide of the second complementarity domain that is complementary to its corresponding nucleotide of the first complementarity domain.

[0492] In an embodiment, the targeting domain has, or consists of, 16, 17, 18, 19, 20, 21, 22, 23, 24, 25 or 26 nucleotides (e.g., 16, 17, 18, 19, 20, 21, 22, 23, 24, 25 or 26 consecutive nucleotides) having complementarity with the target domain, e.g., the targeting domain is 16, 17, 18, 19, 20, 21, 22, 23, 24, 25 or 26 nucleotides in length.

[0493] In an embodiment, the targeting domain comprises, has, or consists of, 16 nucleotides (e.g., 16 consecutive nucleotides) having complementarity with the target domain, e.g., the targeting domain is 16 nucleotides in length.

[0494] In an embodiment, the targeting domain comprises, has, or consists of, 17 nucleotides (e.g., 17 consecutive nucleotides) having complementarity with the target domain, e.g., the targeting domain is 17 nucleotides in length.

[0495] In an embodiment, the targeting domain comprises, has, or consists of, 18 nucleotides (e.g., 18 consecutive nucleotides) having complementarity with the target domain, e.g., the targeting domain is 18 nucleotides in length.

[0496] In an embodiment, the targeting domain comprises, has, or consists of, 19 nucleotides (e.g., 19 consecutive nucleotides) having complementarity with the target domain, e.g., the targeting domain is 19 nucleotides in length.

[0497] In an embodiment, the targeting domain comprises, has, or consists of, 20 nucleotides (e.g., 20 consecutive nucleotides) having complementarity with the target domain, e.g., the targeting domain is 20 nucleotides in length.

[0498] In an embodiment, the targeting domain comprises, has, or consists of, 21 nucleotides (e.g., 21 consecutive nucleotides) having complementarity with the target domain, e.g., the targeting domain is 21 nucleotides in length.

[0499] In an embodiment, the targeting domain comprises, has, or consists of, 22 nucleotides (e.g., 22 consecutive nucleotides) having complementarity with the target domain, e.g., the targeting domain is 22 nucleotides in length.

[0500] In an embodiment, the targeting domain comprises, has, or consists of, 23 nucleotides (e.g., 23 consecutive nucleotides) having complementarity with the target domain, e.g., the targeting domain is 23 nucleotides in length.

[0501] In an embodiment, the targeting domain comprises, has, or consists of, 24 nucleotides (e.g., 24 consecutive nucleotides) having complementarity with the target domain, e.g., the targeting domain is 24 nucleotides in length.

[0502] In an embodiment, the targeting domain comprises, has, or consists of, 25 nucleotides (e.g., 25 consecutive nucleotides) having complementarity with the target domain, e.g., the targeting domain is 25 nucleotides in length.

[0503] In an embodiment, the targeting domain comprises, has, or consists of, 26 nucleotides (e.g., 26 consecutive nucleotides) having complementarity with the target domain, e.g., the targeting domain is 26 nucleotides in length.

[0504] In an embodiment, the targeting domain comprises, has, or consists of, 16 nucleotides (e.g., 16 consecutive nucleotides) having complementarity with the target domain, e.g., the targeting domain is 16 nucleotides in length; and the proximal and tail domain, when taken together, comprise at least 15, 18, 20, 25, 30, 31, 35, 40, 45, 49, 50, or 53 nucleotides.

[0505] In an embodiment, the targeting domain comprises, has, or consists of, 16 nucleotides (e.g., 16 consecutive nucleotides) having complementarity with the target domain, e.g., the targeting domain is 16 nucleotides in length; and there are at least 15, 18, 20, 25, 30, 31, 35, 40, 45, 49, 50, or 53 nucleotides 3′ to the last nucleotide of the second complementarity domain.

[0506] In an embodiment, the targeting domain comprises, has, or consists of, 16 nucleotides (e.g., 16 consecutive nucleotides) having complementarity with the target domain, e.g., the targeting domain is 16 nucleotides in length; and there are at least 16, 19, 21, 26, 31, 32, 36, 41, 46, 50, 51, or 54 nucleotides 3′ to the last nucleotide of the second complementarity domain that is complementary to its corresponding nucleotide of the first complementarity domain.

[0507] In an embodiment, the targeting domain comprises, has, or consists of, 17 nucleotides (e.g., 17 consecutive nucleotides) having complementarity with the target domain, e.g., the targeting domain is 17 nucleotides in length; and the proximal and tail domain, when taken together, comprise at least 15, 18, 20, 25, 30, 31, 35, 40, 45, 49, 50, or 53 nucleotides.

[0508] In an embodiment, the targeting domain comprises, has, or consists of, 17 nucleotides (e.g., 17 consecutive nucleotides) having complementarity with the target domain, e.g., the targeting domain is 17 nucleotides in length; and there are at least 15, 18, 20, 25, 30, 31, 35, 40, 45, 49, 50, or 53 nucleotides 3′ to the last nucleotide of the second complementarity domain.

[0509] In an embodiment, the targeting domain comprises, has, or consists of, 17 nucleotides (e.g., 17 consecutive nucleotides) having complementarity with the target domain, e.g., the targeting domain is 17 nucleotides in length; and there are at least 16, 19, 21, 26, 31, 32, 36, 41, 46, 50, 51, or 54 nucleotides 3′ to the last nucleotide of the second complementarity domain that is complementary to its corresponding nucleotide of the first complementarity domain.

[0510] In an embodiment, the targeting domain comprises, has, or consists of, 18 nucleotides (e.g., 18 consecutive nucleotides) having complementarity with the target domain, e.g., the targeting domain is 18 nucleotides in length; and the proximal and tail domain, when taken together, comprise at least 15, 18, 20, 25, 30, 31, 35, 40, 45, 49, 50, or 53 nucleotides.

[0511] In an embodiment, the targeting domain comprises, has, or consists of, 18 nucleotides (e.g., 18 consecutive nucleotides) having complementarity with the target domain, e.g., the targeting domain is 18 nucleotides in length; and there are at least 15, 18, 20, 25, 30, 31, 35, 40, 45, 49, 50, or 53 nucleotides 3′ to the last nucleotide of the second complementarity domain.

[0512] In an embodiment, the targeting domain comprises, has, or consists of, 18 nucleotides (e.g., 18 consecutive nucleotides) having complementarity with the target domain, e.g., the targeting domain is 18 nucleotides in length; and there are at least 16, 19, 21, 26, 31, 32, 36, 41, 46, 50, 51, or 54 nucleotides 3′ to the last nucleotide of the second complementarity domain that is complementary to its corresponding nucleotide of the first complementarity domain.

[0513] In an embodiment, the targeting domain comprises, has, or consists of, 19 nucleotides (e.g., 19 consecutive nucleotides) having complementarity with the target domain, e.g., the targeting domain is 19 nucleotides in length; and the proximal and tail domain, when taken together, comprise at least 15, 18, 20, 25, 30, 31, 35, 40, 45, 49, 50, or 53 nucleotides.

[0514] In an embodiment, the targeting domain comprises, has, or consists of, 19 nucleotides (e.g., 19 consecutive nucleotides) having complementarity with the target domain, e.g., the targeting domain is 19 nucleotides in length; and there are at least 15, 18, 20, 25, 30, 31, 35, 40, 45, 49, 50, or 53 nucleotides 3′ to the last nucleotide of the second complementarity domain.

[0515] In an embodiment, the targeting domain comprises, has, or consists of, 19 nucleotides (e.g., 19 consecutive nucleotides) having complementarity with the target domain, e.g., the targeting domain is 19 nucleotides in length; and there are at least 16, 19, 21, 26, 31, 32, 36, 41, 46, 50, 51, or 54 nucleotides 3′ to the last nucleotide of the second complementarity domain that is complementary to its corresponding nucleotide of the first complementarity domain.

[0516] In an embodiment, the targeting domain comprises, has, or consists of, 20 nucleotides (e.g., 20 consecutive nucleotides) having complementarity with the target domain, e.g., the targeting domain is 20 nucleotides in length; and the proximal and tail domain, when taken together, comprise at least 15, 18, 20, 25, 30, 31, 35, 40, 45, 49, 50, or 53 nucleotides.

[0517] In an embodiment, the targeting domain comprises, has, or consists of, 20 nucleotides (e.g., 20 consecutive nucleotides) having complementarity with the target domain, e.g., the targeting domain is 20 nucleotides in length; and there are at least 15, 18, 20, 25, 30, 31, 35, 40, 45, 49, 50, or 53 nucleotides 3′ to the last nucleotide of the second complementarity domain.

[0518] In an embodiment, the targeting domain comprises, has, or consists of, 20 nucleotides (e.g., 20 consecutive nucleotides) having complementarity with the target domain, e.g., the targeting domain is 20 nucleotides in length; and there are at least 16, 19, 21, 26, 31, 32, 36, 41, 46, 50, 51, or 54 nucleotides 3′ to the last nucleotide of the second complementarity domain that is complementary to its corresponding nucleotide of the first complementarity domain.

[0519] In an embodiment, the targeting domain comprises, has, or consists of, 21 nucleotides (e.g., 21 consecutive nucleotides) having complementarity with the target domain, e.g., the targeting domain is 21 nucleotides in length; and the proximal and tail domain, when taken together, comprise at least 15, 18, 20, 25, 30, 31, 35, 40, 45, 49, 50, or 53 nucleotides.

[0520] In an embodiment, the targeting domain comprises, has, or consists of, 21 nucleotides (e.g., 21 consecutive nucleotides) having complementarity with the target domain, e.g., the targeting domain is 21 nucleotides in length; and there are at least 15, 18, 20, 25, 30, 31, 35, 40, 45, 49, 50, or 53 nucleotides 3′ to the last nucleotide of the second complementarity domain.

[0521] In an embodiment, the targeting domain comprises, has, or consists of, 21 nucleotides (e.g., 21 consecutive nucleotides) having complementarity with the target domain, e.g., the targeting domain is 21 nucleotides in length; and there are at least 16, 19, 21, 26, 31, 32, 36, 41, 46, 50, 51, or 54 nucleotides 3′ to the last nucleotide of the second complementarity domain that is complementary to its corresponding nucleotide of the first complementarity domain.

[0522] In an embodiment, the targeting domain comprises, has, or consists of, 22 nucleotides (e.g., 22 consecutive nucleotides) having complementarity with the target domain, e.g., the targeting domain is 22 nucleotides in length; and the proximal and tail domain, when taken together, comprise at least 15, 18, 20, 25, 30, 31, 35, 40, 45, 49, 50, or 53 nucleotides.

[0523] In an embodiment, the targeting domain comprises, has, or consists of, 22 nucleotides (e.g., 22 consecutive nucleotides) having complementarity with the target domain, e.g., the targeting domain is 22 nucleotides in length; and there are at least 15, 18, 20, 25, 30, 31, 35, 40, 45, 49, 50, or 53 nucleotides 3′ to the last nucleotide of the second complementarity domain.

[0524] In an embodiment, the targeting domain comprises, has, or consists of, 22 nucleotides (e.g., 22 consecutive nucleotides) having complementarity with the target domain, e.g., the targeting domain is 22 nucleotides in length; and there are at least 16, 19, 21, 26, 31, 32, 36, 41, 46, 50, 51, or 54 nucleotides 3′ to the last nucleotide of the second complementarity domain that is complementary to its corresponding nucleotide of the first complementarity domain.

[0525] In an embodiment, the targeting domain comprises, has, or consists of, 23 nucleotides (e.g., 23 consecutive nucleotides) having complementarity with the target domain, e.g., the targeting domain is 23 nucleotides in length; and the proximal and tail domain, when taken together, comprise at least 15, 18, 20, 25, 30, 31, 35, 40, 45, 49, 50, or 53 nucleotides.

[0526] In an embodiment, the targeting domain comprises, has, or consists of, 23 nucleotides (e.g., 23 consecutive nucleotides) having complementarity with the target domain, e.g., the targeting domain is 23 nucleotides in length; and there are at least 15, 18, 20, 25, 30, 31, 35, 40, 45, 49, 50, or 53 nucleotides 3′ to the last nucleotide of the second complementarity domain.

[0527] In an embodiment, the targeting domain comprises, has, or consists of, 23 nucleotides (e.g., 23 consecutive nucleotides) having complementarity with the target domain, e.g., the targeting domain is 23 nucleotides in length; and there are at least 16, 19, 21, 26, 31, 32, 36, 41, 46, 50, 51, or 54 nucleotides 3′ to the last nucleotide of the second complementarity domain that is complementary to its corresponding nucleotide of the first complementarity domain.

[0528] In an embodiment, the targeting domain comprises, has, or consists of, 24 nucleotides (e.g., 24 consecutive nucleotides) having complementarity with the target domain, e.g., the targeting domain is 24 nucleotides in length; and the proximal and tail domain, when taken together, comprise at least 15, 18, 20, 25, 30, 31, 35, 40, 45, 49, 50, or 53 nucleotides.

[0529] In an embodiment, the targeting domain comprises, has, or consists of, 24 nucleotides (e.g., 24 consecutive nucleotides) having complementarity with the target domain, e.g., the targeting domain is 24 nucleotides in length; and there are at least 15, 18, 20, 25, 30, 31, 35, 40, 45, 49, 50, or 53 nucleotides 3′ to the last nucleotide of the second complementarity domain.

[0530] In an embodiment, the targeting domain comprises, has, or consists of, 24 nucleotides (e.g., 24 consecutive nucleotides) having complementarity with the target domain, e.g., the targeting domain is 24 nucleotides in length; and there are at least 16, 19, 21, 26, 31, 32, 36, 41, 46, 50, 51, or 54 nucleotides 3′ to the last nucleotide of the second complementarity domain that is complementary to its corresponding nucleotide of the first complementarity domain.

[0531] In an embodiment, the targeting domain comprises, has, or consists of, 25 nucleotides (e.g., 25 consecutive nucleotides) having complementarity with the target domain, e.g., the targeting domain is 25 nucleotides in length; and the proximal and tail domain, when taken together, comprise at least 15, 18, 20, 25, 30, 31, 35, 40, 45, 49, 50, or 53 nucleotides.

[0532] In an embodiment, the targeting domain comprises, has, or consists of, 25 nucleotides (e.g., 25 consecutive nucleotides) having complementarity with the target domain, e.g., the targeting domain is 25 nucleotides in length; and there are at least 15, 18, 20, 25, 30, 31, 35, 40, 45, 49, 50, or 53 nucleotides 3′ to the last nucleotide of the second complementarity domain.

[0533] In an embodiment, the targeting domain comprises, has, or consists of, 25 nucleotides (e.g., 25 consecutive nucleotides) having complementarity with the target domain, e.g., the targeting domain is 25 nucleotides in length; and there are at least 16, 19, 21, 26, 31, 32, 36, 41, 46, 50, 51, or 54 nucleotides 3′ to the last nucleotide of the second complementarity domain that is complementary to its corresponding nucleotide of the first complementarity domain.

[0534] In an embodiment, the targeting domain comprises, has, or consists of, 26 nucleotides (e.g., 26 consecutive nucleotides) having complementarity with the target domain, e.g., the targeting domain is 26 nucleotides in length; and the proximal and tail domain, when taken together, comprise at least 15, 18, 20, 25, 30, 31, 35, 40, 45, 49, 50, or 53 nucleotides.

[0535] In an embodiment, the targeting domain comprises, has, or consists of, 26 nucleotides (e.g., 26 consecutive nucleotides) having complementarity with the target domain, e.g., the targeting domain is 26 nucleotides in length; and there are at least 15, 18, 20, 25, 30, 31, 35, 40, 45, 49, 50, or 53 nucleotides 3′ to the last nucleotide of the second complementarity domain.

[0536] In an embodiment, the targeting domain comprises, has, or consists of, 26 nucleotides (e.g., 26 consecutive nucleotides) having complementarity with the target domain, e.g., the targeting domain is 26 nucleotides in length; and there are at least 16, 19, 21, 26, 31, 32, 36, 41, 46, 50, 51, or 54 nucleotides 3′ to the last nucleotide of the second complementarity domain that is complementary to its corresponding nucleotide of the first complementarity domain.

[0537] Exemplary Modified gRNAs

[0538] As discussed above and in the Examples, we have found that the guide RNA (gRNA) component of the CRISPR/Cas system (e.g., a CRISPR/Cas9 system) is more efficient at editing genes in certain circulatory cell types (e.g., T cells) ex vivo when it has been modified at or near its 5′ end (e.g., when the 5′ end of a gRNA is modified by the inclusion of a eukaryotic mRNA cap structure or cap analog). While not wishing to be bound by theory it is believed that these and other modified gRNAs described herein exhibit enhanced stability with certain cell types (e.g., circulating cells such as T cells) and that this might be responsible for the observed improvements.

[0539] The present invention encompasses the realization that the improvements observed with a 5′ capped gRNA can be extended to gRNAs that have been modified in other ways to achieve the same type of structural or functional result (e.g., by the inclusion of modified nucleosides or nucleotides, or when an in vitro transcribed gRNA is modified by treatment with a phosphatase such as calf intestinal alkaline phosphatase to remove the 5′ triphosphate group). While not wishing to be bound by theory, in some embodiments, the modified gRNAs described herein may contain one or more modifications (e.g., modified nucleosides or nucleotides) which introduce stability toward nucleases (e.g., by the inclusion of modified nucleosides or nucleotides and/or a 3′ polyA tract).

[0540] Thus, in one aspect, methods and compositions discussed herein provide methods and compositions for gene editing of certain cells (e.g., ex vivo gene editing) by using gRNAs which have been modified at or near their 5′ end (e.g., within 1-10, 1-5, or 1-2 nucleotides of their 5′ end).

[0541] In some embodiments, the 5′ end of the gRNA molecule lacks a 5′ triphosphate group. In some embodiments, the 5′ end of the targeting domain lacks a 5′ triphosphate group. In some embodiments, the 5′ end of the gRNA molecule includes a 5′ cap. In some embodiments, the 5′ end of the targeting domain includes a 5′ cap. In some embodiments, the gRNA molecule lacks a 5′ triphosphate group. In some embodiments, the gRNA molecule comprises a targeting domain and the 5′ end of the targeting domain lacks a 5′ triphosphate group. In some embodiments, gRNA molecule includes a 5′ cap. In some embodiments, the gRNA molecule comprises a targeting domain and the 5′ end of the targeting domain includes a 5′ cap.

[0542] In an embodiment, the 5′ end of a gRNA is modified by the inclusion of a eukaryotic mRNA cap structure or cap analog (e.g., without limitation a G(5′)ppp(5′)G cap analog, a m7G(5′)ppp(5′)G cap analog, or a 3′-O-Me-m7G(5′)ppp(5)G anti reverse cap analog (ARCA)). In certain embodiments the 5′ cap comprises a modified guanine nucleotide that is linked to the remainder of the gRNA molecule via a 5′-5′ triphosphate linkage. In some embodiments, the 5′ cap comprises two optionally modified guanine nucleotides that are linked via a 5′-5′ triphosphate linkage. In some embodiments, the 5′ end of the gRNA molecule has the chemical formula:

[chemical structure]

[0543] wherein:
[0544] each of B¹ and B^{1′} is independently

[chemical structure]

[0545] each R¹ is independently C₁₋₄ alkyl, optionally substituted by a phenyl or a 6-membered heteroaryl;
[0546] each of R², R^{2′}, and R^{3′} is independently H, F, OH, or O—C₁₋₄ alkyl;
[0547] each of X, Y, and Z is independently O or S; and
[0548] each of X′ and Y′ is independently O or CH₂.

[0549] In an embodiment, each R¹ is independently —CH₃, —CH₂CH₃, or —CH₂C₆H₅.

[0550] In an embodiment, R¹ is —CH₃.
[0551] In an embodiment, B^{1′} is

[chemical structure]

[0552] In an embodiment, each of R², R^{2′}, and R^{3′} is independently H, OH, or O—CH₃.

[0553] In an embodiment, each of X, Y, and Z is O.

[0554] In an embodiment, X′ and Y′ are O.

[0555] In an embodiment, the 5′ end of the gRNA molecule has the chemical formula:

[chemical structure]

[0556] In an embodiment, the 5′ end of the gRNA molecule has the chemical formula:

[chemical structure]

[0557] In an embodiment, the 5′ end of the gRNA molecule has the chemical formula:

[chemical structure]

[0558] In an embodiment, the 5′ end of the gRNA molecule has the chemical formula:

[chemical structure]

[0559] In an embodiment, X is S, and Y and Z are O.

[0560] In an embodiment, Y is S, and X and Z are O.

[0561] In an embodiment, Z is S, and X and Y are O.

[0562] In an embodiment, the phosphorothioate is the Sp diastereomer.

[0563] In an embodiment, X′ is CH₂, and Y′ is O.

[0564] In an embodiment, X′ is O, and Y′ is CH₂.

[0565] In an embodiment, the 5′ cap comprises two optionally modified guanine nucleotides that are linked via an optionally modified 5′-5′ tetraphosphate linkage.

[0566] In an embodiment, the 5′ end of the gRNA molecule has the chemical formula:

[chemical structure]

[0567] wherein:
[0568] each of B¹ and B^{1′} is independently

[chemical structure]

[0569] each R¹ is independently C₁₋₄ alkyl, optionally substituted by a phenyl or a 6-membered heteroaryl;
[0570] each of R², R^{2′}, and R^{3′} is independently H, F, OH, or O—C₁₋₄ alkyl;
[0571] each of W, X, Y, and Z is independently O or S; and
[0572] each of X′, Y′, and Z′ is independently O or CH₂.

[0573] In an embodiment, each R¹ is independently —CH₃, —CH₂CH₃, or —CH₂C₆H₅.

[0574] In an embodiment, R¹ is —CH₃.

[0575] In an embodiment, B^{1′} is

[chemical structure]

[0576] In an embodiment, each of R², R^{2′}, and R^{3′} is independently H, OH, or O—CH₃.

[0577] In an embodiment, each of W, X, Y, and Z is O.

[0578] In an embodiment, each of X′, Y′, and Z′ are O.

[0579] In an embodiment, X′ is CH₂, and Y′ and Z′ are O.

[0580] In an embodiment, Y′ is CH₂, and X′ and Z′ are O.

[0581] In an embodiment, Z′ is CH₂, and X′ and Y′ are O.

[0582] In an embodiment, the 5′ cap comprises two optionally modified guanine nucleotides that are linked via an optionally modified 5′-5′ pentaphosphate linkage.

[0583] In an embodiment, the 5′ end of the gRNA molecule has the chemical formula:

[chemical structure]

[0584] wherein:
[0585] each of B¹ and B^{1′} is independently

[chemical structure]

[0586] each R¹ is independently C₁₋₄ alkyl, optionally substituted by a phenyl or a 6-membered heteroaryl;
[0587] each of R², R^{2′}, and R^{3′} is independently H, F, OH, or O—C₁₋₄ alkyl;
[0588] each of V, W, X, Y, and Z is independently O or S; and
[0589] each of W′, X′, Y′, and Z′ is independently O or CH₂.

[0590] In an embodiment, each R¹ is independently —CH₃, —CH₂CH₃, or —CH₂C₆H₅.

[0591] In an embodiment, R¹ is —CH₃.

[0592] In an embodiment, B^{1′} is

[chemical structure]

[0593] In an embodiment, each of R², R^{2′}, and R^{3′} is independently H, OH, or O—CH₃.

[0594] In an embodiment, each of V, W, X, Y, and Z is O.

[0595] In an embodiment, each of W′, X′, Y′, and Z′ is O.

[0596] It is to be understood that as used herein, the term “5′ cap” encompasses traditional mRNA 5′ cap structures but also analogs of these. For example, in addition to the 5′ cap structures that are encompassed by the chemical structures shown above, one may use, e.g., tetraphosphate analogs having a methylene-bis(phosphonate) moiety (e.g., see Rydzik, A M et al., (2009) Org Biomol Chem 7(22):4763-76), analogs having a sulfur substitution for a non-bridging oxygen (e.g., see Grudzien-Nogalska, E. et al, (2007) RNA 13(10): 1745-1755), N7-benzylated dinucleoside tetraphosphate analogs (e.g., see Grudzien, E. et al., (2004) RNA 10(9): 1479-1487), or anti-reverse cap analogs (e.g., see U.S. Pat. No. 7,074,596 and Jemielity, J. et al., (2003) RNA 9(9): 1 108-1 122 and Stepinski, J. et al., (2001) RNA 7(10):1486-1495). The present application also encompasses the use of cap analogs with halogen groups instead of OH or OMe (e.g., see U.S. Pat. No. 8,304,529); cap analogs with at least one phosphorothioate (PS) linkage (e.g., see U.S. Pat. No. 8,153,773 and Kowalska, J. et al., (2008) RNA 14(6): 1 1 19-1131); and cap analogs with at least one boranophosphate or phosphoroselenoate linkage (e.g., see U.S. Pat. No. 8,519,110); and alkynyl-derivatized 5′ cap analogs (e.g., see U.S. Pat. No. 8,969,545).

[0597] In general, the 5′ cap can be included during either chemical synthesis or in vitro transcription of the gRNA. In an embodiment, a 5′ cap is not used and the gRNA (e.g., an in vitro transcribed gRNA) is instead modified by treatment with a phosphatase (e.g., calf intestinal alkaline phosphatase) to remove the 5′ triphosphate group.

[0598] Methods and compositions discussed herein also provide methods and compositions for gene editing by using gRNAs which comprise a 3′ polyA tail (also called a polyA tract herein). Such gRNAs may, for example, be prepared by adding a polyA tail to a gRNA molecule precursor using a polyadenosine polymerase following in vitro transcription of the gRNA molecule precursor. For example, in one embodiment, a polyA tail may be added enzymatically using a polymerase such as E. coli polyA polymerase (E-PAP). gRNAs including a polyA tail may also be prepared by in vitro transcription from a DNA template. In one embodiment, a polyA tail of defined length is encoded on a DNA template and transcribed with the gRNA via an RNA polymerase (such as T7 RNA polymerase). gRNAs with a polyA tail may also be prepared by ligating a polyA oligonucleotide to a gRNA molecule precursor following in vitro transcription using an RNA ligase or a DNA ligase with or without a splinted DNA oligonucleotide complementary to the gRNA molecule precursor and the polyA oligonucleotide. For example, in one embodiment, a polyA tail of defined length is synthesized as a synthetic oligonucleotide and ligated on the 3′ end of the gRNA with either an RNA ligase or a DNA ligase with or without a splinted DNA oligonucleotide complementary to the guide RNA and the polyA oligonucleotide. gRNAs including the polyA tail may also be prepared synthetically, in one or several pieces that are ligated together by either an RNA ligase or a DNA ligase with or without one or more splinted DNA oligonucleotides.

[0599] In some embodiments, the polyA tail is comprised of fewer than 50 adenine nucleotides, for example, fewer than 45 adenine nucleotides, fewer than 40 adenine nucleotides, fewer than 35 adenine nucleotides, fewer than 30 adenine nucleotides, fewer than 25 adenine nucleotides or fewer than 20 adenine nucleotides. In some embodiments the polyA tail is comprised of between 5 and 50 adenine nucleotides, for example between 5 and 40 adenine nucleotides, between 5 and 30 adenine nucleotides, between 10 and 50 adenine nucleotides, or between 15 and 25 adenine nucleotides. In some embodiments, the polyA tail is comprised of about 20 adenine nucleotides.

[0600] Methods and compositions discussed herein also provide methods and compositions for gene editing (e.g., ex vivo gene editing) by using gRNAs which include one or more modified nucleosides or nucleotides that are described herein.

[0601] While some of the exemplary modifications discussed in this section may be included at any position within the gRNA sequence, in some embodiments, a gRNA comprises a modification at or near its 5′ end (e.g., within 1-10, 1-5, or 1-2 nucleotides of its 5′ end). In some embodiments, a gRNA comprises a modification at or near its 3′ end (e.g., within 1-10, 1-5, or 1-2 nucleotides of its 3′ end). In some embodiments, a gRNA comprises both a modification at or near its 5′ end and a modification at or near its 3′ end. For example, in some embodiments, a gRNA molecule (e.g., an in vitro transcribed gRNA) comprises a targeting domain which is complementary with a target domain from a gene expressed in a eukaryotic cell, wherein the gRNA molecule is modified at its 5′ end and comprises a 3′ polyA tail. The gRNA molecule may, for example, lack a 5′ triphosphate group (e.g., the 5′ end of the targeting domain lacks a 5′ triphosphate group). In an embodiment, a gRNA (e.g., an in vitro transcribed gRNA) is modified by treatment with a phosphatase (e.g., calf intestinal alkaline phosphatase) to remove the 5′ triphosphate group and comprises a 3′ polyA tail as described herein. The gRNA molecule may alternatively include a 5′ cap (e.g., the 5′ end of the targeting domain includes a 5′ cap). In an embodiment, a gRNA (e.g., an in vitro transcribed gRNA) contains both a 5′ cap structure or cap analog and a 3′ polyA tail as described herein. In some embodiments, the 5′ cap comprises a modified guanine nucleotide that is linked to the remainder of the gRNA molecule via a 5′-5′ triphosphate linkage. In some embodiments, the 5′ cap comprises two optionally modified guanine nucleotides that are linked via an optionally modified 5′-5′ triphosphate linkage (e.g., as described above). In some embodiments the polyA tail is comprised of between 5 and 50 adenine nucleotides, for example between 5 and 40 adenine nucleotides, between 5 and 30 adenine nucleotides, between 10 and 50 adenine nucleotides, between 15 and 25 adenine nucleotides, fewer than 30 adenine nucleotides, fewer than 25 adenine nucleotides or about 20 adenine nucleotides.

[0602] In yet other embodiments, the present invention provides a gRNA molecule comprising a targeting domain which is complementary with a target domain from a gene expressed in a eukaryotic cell, wherein the gRNA molecule comprises a 3′ polyA tail which is comprised of fewer than 30 adenine nucleotides (e.g., fewer than 25 adenine nucleotides, between 15 and 25 adenine nucleotides, or about 20 adenine nucleotides). In some embodiments, these gRNA molecules are further modified at their 5′ end (e.g., the gRNA molecule is modified by treatment with a phosphatase to remove the 5′ triphosphate group or modified to include a 5′ cap as described herein).

[0603] In some embodiments, gRNAs can be modified at a 3′ terminal U ribose. In some embodiments, the 5′ end and a 3′ terminal U ribose of the gRNA are modified (e.g., the gRNA is modified by treatment with a phosphatase to remove the 5′ triphosphate group or modified to include a 5′ cap as described herein). For example, the two terminal hydroxyl groups of the U ribose can be oxidized to aldehyde groups and a concomitant opening of the ribose ring to afford a modified nucleoside as shown below:

[chemical structure]

wherein “U” can be an unmodified or modified uridine.

[0604] In another embodiment, the 3′ terminal U can be modified with a 2′3′ cyclic phosphate as shown below:

[chemical structure]

wherein “U” can be an unmodified or modified uridine.

[0605] In some embodiments, the gRNA molecules may contain 3′ nucleotides which can be stabilized against degradation, e.g., by incorporating one or more of the modified nucleotides described herein. In this embodiment, e.g., uridines can be replaced with modified uridines, e.g., 5-(2-amino)propyl uridine, and 5-bromo uridine, or with any of the modified uridines described herein; adenosines, cytidines and guanosines can be replaced with modified adenosines, cytidines and guanosines, e.g., with modifications at the 8-position, e.g., 8-bromo guanosine, or with any of the modified adenosines, cytidines or guanosines described herein.

[0606] In some embodiments, sugar-modified ribonucleotides can be incorporated into the gRNA, e.g., wherein the 2′ OH-group is replaced by a group selected from H, —OR, —R (wherein R can be, e.g., alkyl, cycloalkyl, aryl, aralkyl, heteroaryl or sugar), halo, —SH, —SR (wherein R can be, e.g., alkyl, cycloalkyl, aryl, aralkyl, heteroaryl or sugar), amino (wherein amino can be, e.g., NH₂; alkylamino, dialkylamino, heterocyclylamino, arylamino, diarylamino, heteroarylamino, diheteroarylamino, or amino acid); or cyano (—CN). In some embodiments, the phosphate backbone can be modified as described herein, e.g., with a phosphothioate group. In some embodiments, one or more of the nucleotides of the gRNA can each independently be a modified or unmodified nucleotide including, but not limited to 2′-sugar modified, such as, 2′-O-methyl, 2′-O-methoxyethyl, or 2′-Fluoro modified including, e.g., 2′-F or 2′-O-methyl, adenosine (A), 2′-F or 2′-O-methyl, cytidine (C), 2′-F or 2′-O-methyl, uridine (U), 2′-F or 2′-O-methyl, thymidine (T), 2′-F or 2′-O-methyl, guanosine (G), 2′-O-methoxyethyl-5-methyluridine (Teo), 2′-O-methoxyethyladenosine (Aeo), 2′-O-methoxyethyl-5-methylcytidine (m5Ceo), and any combinations thereof.

[0607] In some embodiments, a gRNA can include “locked” nucleic acids (LNA) in which the 2′ OH-group can be connected, e.g., by a C1-6 alkylene or C1-6 heteroalkylene bridge, to the 4′ carbon of the same ribose sugar, where exemplary bridges can include methylene, propylene, ether, or amino bridges; O-amino (wherein amino can be, e.g., NH₂; alkylamino, dialkylamino, heterocyclylamino, arylamino, diarylamino, heteroarylamino, or diheteroarylamino, ethylenediamine, or polyamino) and aminoalkoxy or O(CH₂)ₙ-amino (wherein amino can be, e.g., NH₂; alkylamino, dialkylamino, heterocyclylamino, arylamino, diarylamino, heteroarylamino, or diheteroarylamino, ethylenediamine, or polyamino).

[0608] In some embodiments, a gRNA can include a modified nucleotide which is multicyclic (e.g., tricyclo; and “unlocked” forms, such as glycol nucleic acid (GNA) (e.g., R-GNA or S-GNA, where ribose is replaced by glycol units attached to phosphodiester bonds), or threose nucleic acid (TNA, where ribose is replaced with α-L-threofuranosyl-(3′→2′)).

[0609] Generally, gRNA molecules include the sugar group ribose, which is a 5-membered ring having an oxygen. Exemplary modified gRNAs can include, without limitation, replacement of the oxygen in ribose (e.g., with sulfur (S), selenium (Se), or alkylene, such as, e.g., methylene or ethylene); addition of a double bond (e.g., to replace ribose with cyclopentenyl or cyclohexenyl); ring contraction of ribose (e.g., to form a 4-membered ring of cyclobutane or oxetane); ring expansion of ribose (e.g., to form a 6- or 7-membered ring having an additional carbon or heteroatom, such as for example, anhydrohexitol, altritol, mannitol, cyclohexanyl, cyclohexenyl, and morpholino that also has a phosphoramidate backbone). Although the majority of sugar analog alterations are localized to the 2′ position, other sites are amenable to modification, including the 4′ position. In an embodiment, a gRNA comprises a 4′-S, 4′-Se or a 4′-C-aminomethyl-2′-O-Me modification.

[0610] In some embodiments, deaza nucleotides, e.g., 7-deaza-adenosine, can be incorporated into the gRNA. In some embodiments, O- and N-alkylated nucleotides, e.g., N6-methyl adenosine, can be incorporated into the gRNA. In some embodiments, one or more or all of the nucleotides in a gRNA molecule are deoxynucleotides.

II. Methods for Designing gRNAs

[0611] Methods for designing gRNAs are described herein, including methods for selecting, designing and validating targeting domains. Methods for selection and validation of target sequences as well as off-target analyses are described, e.g., in Mali et al., 2013 SCIENCE 339(6121): 823-826; Hsu et al. NAT BIOTECHNOL, 31(9): 827-32; Fu et al., 2014 NAT BIOTECHNOL, doi: 10.1038/nbt.2808. PubMed PMID: 24463574; Heigwer et al., 2014 NAT METHODS 11(2):122-3. doi: 10.1038/nmeth.2812. PubMed PMID: 24481216; Bae et al., 2014 BIOINFORMATICS PubMed PMID: 24463181; Xiao A et al., 2014 BIOINFORMATICS PubMed PMID: 24389662.

[0612] In some embodiments, a software tool can be used to optimize the choice of gRNA within a target sequence, e.g., to minimize total off-target activity across the genome. Off target activity may be other than cleavage. For example, for each possible gRNA choice using S. pyogenes Cas9, software tools can identify all potential off-target sequences (preceding either NAG or NGG PAMs) across the genome that contain up to a certain number (e.g., 1, 2, 3, 4, 5, 6, 7, 8, 9, or 10) of mismatched base-pairs. The cleavage efficiency at each off-target sequence can be predicted, e.g., using an experimentally-derived weighting scheme. Each possible gRNA can then be ranked according to its total predicted off-target cleavage; the top-ranked gRNAs represent those that are likely to have the greatest on-target and the least off-target cleavage. Other functions, e.g., automated reagent design for gRNA vector construction, primer design for the on-target Surveyor assay, and primer design for high-throughput detection and quantification of off-target cleavage via next-generation sequencing, can also be included in the tool. Candidate gRNA molecules can be evaluated by art-known methods or as described in Section IV herein.

[0613] In some embodiments, gRNAs for use with S. pyogenes, S. aureus, and N. meningitidis Cas9s are identified using a DNA sequence searching algorithm, e.g., using a custom gRNA design software based on the public tool cas-offinder (Bae et al. Bioinformatics. 2014; 30(10): 1473-1475). Said custom gRNA design software scores guides after calculating their genomewide off-target propensity. Typically matches ranging from perfect matches to 7 mismatches are considered for guides ranging in length from 17 to 24. Once the off-target sites are computationally determined, an aggregate score is calculated for each guide and summarized in a tabular output using a web-interface. In addition to identifying potential gRNA sites adjacent to PAM sequences, the software also identifies all PAM adjacent sequences that differ by 1, 2, 3 or more nucleotides from the selected gRNA sites. Genomic DNA sequence for each gene are obtained from the UCSC Genome browser and sequences are screened for repeat elements using the publicly available RepeatMasker program. RepeatMasker searches input DNA sequences for repeated elements and regions of low complexity. The output is a detailed annotation of the repeats present in a given query sequence.

[0614] Following identification, gRNAs are ranked into tiers based on on one or more of their distance to the target site, their orthogonality and presence of a 5′ G (based on identification of close matches in the human genome containing a relavant PAM, e.g., in the case of S. pyogenes, a NGG PAM, in the case of S. aureus, NNGRR (e.g, a NNGRRT (R=A or G) or NNGRRV) PAM, and in the case of N. meningitidis, a NNNNGATT or NNNNGCTT PAM). Orthogonality refers to the number of sequences in the human genome that contain a minimum number of mismatches to the target sequence. A “high level of orthogonality” or “good orthogonality” may, for example, refer to 20-mer targeting domains that have no identical sequences in the human genome besides the intended target, nor any sequences that contain one or two mismatches in the target sequence. Targeting domains with good orthogonality are selected to minimize off-target DNA cleavage. It is to be understood that this is a non-limiting example and that a variety of strategies could be utilized to identify gRNAs for use with S. pyogenes, S. aureus and N. meningitidis or other Cas9 enzymes.

[0615] First Strategy for Designing and Tiering gRNAs

[0616] In a first strategy, gRNAs for use with the S. pyogenes Cas9 are identified using the publicly available web-based ZiFiT server (Fu et al., Improving CRISPR-Cas nuclease specificity using truncated guide RNAs. Nat Biotechnol. 2014 Jan 26. doi: 10.1038/nbt.2808. PubMed PMID: 24463574, for the original references see Sander et al., 2007, NAR 35:W599-605; Sander et al., 2010, NAR 38: W462-8). In addition to identifying potential gRNA sites adjacent to PAM sequences, the software also identifies all PAM adjacent sequences that differ by 1, 2, 3 or more nucleotides from the selected gRNA sites. Genomic DNA sequences for each gene are obtained from the UCSC Genome browser and sequences are screened for repeat elements using the publicly available RepeatMasker program. RepeatMasker searches input DNA sequences for repeated elements and regions of low complexity. The output is a detailed annotation of the repeats present in a given query sequence. Following identification, gRNAs for use with a S. pyogenes Cas9 are ranked into 5 tiers.

[0617] The targeting domains for gRNA molecules are selected based on one or more of their distance to the target site, their orthogonality and presence of a 5′ G (based on the ZiFiT identification of close matches in the human genome containing an NGG PAM). Orthogonality refers to the number of sequences in the human genome that contain a minimum number of mismatches to the target sequence. A “high level of orthogonality” or “good orthogonality” may, for example, refer to 20-mer gRNAs that have no identical sequences in the human genome nor any sequences that contain one or two mismatches in the target sequence. Targeting domains with good orthogonality are selected to miminize off-target DNA cleavage. As an example, for all targets, gRNAs with 16, 17, 18, 19, 20, 21, 22, 23, 24, 25, and/or 26 mer target domains are designed. gRNAs are also selected both for single-gRNA nuclease cutting and for the dual gRNA nickase strategy. Criteria for selecting gRNAs and the determination for which gRNAs can be used for which strategy is based on several considerations:

[0618] gRNAs are identified for both single-gRNA nuclease cleavage and for a dual-gRNA paired “nickase” strategy. Criteria for selecting gRNAs and the determination for which gRNAs can be used for the dual-gRNA paired “nickase” strategy is based on two considerations:
[0619] 1. gRNA pairs should be oriented on the DNA such that PAMs are facing out and cutting with the D10A Cas9 nickase will result in 5′ overhangs.
[0620] 2. An assumption that cleaving with dual nickase pairs will result in deletion of the entire intervening sequence at a reasonable frequency. However, cleaving with dual nickase pairs can also often result in indel mutations at the site of only one of the gRNAs. Candidate pair members can be tested for how efficiently they remove the entire sequence versus just causing indel mutations at the site of one gRNA.

[0621] The targeting domains for first tier gRNA molecules are selected based on (1) a reasonable distance to the target position, e.g., within the first 500 bp of coding sequence downstream of start codon, (2) a high level of orthogonality, and (3) the presence of a 5′ G. For selection of second tier gRNAs, the requirement for a 5′G is removed, but the distance restriction is required and a high level of orthogonality is required. Third tier selection uses the same distance restriction and the requirement for a 5′G, but removes the requirement of good orthogonality. Fourth tier selection uses the same distance restriction but removes the requirement of good orthogonality and start with a 5′G. Fifth tier selection removes the requirement of good orthogonality and a 5′G, and a longer sequence (e.g., the rest of the coding sequence, e.g., additional 500 bp upstream or downstream to the transcription target site) is scanned. Note that tiers are non-inclusive (each gRNA is listed only once).

[0622] Second Strategy for Designing and Tiering gRNAs

[0623] In a second strategy, gRNAs for use with the S. pyogenes, S. aureus and N. meningitidis Cas9 are identified. The second strategy differs from the first strategy as follows.

[0624] Guide RNAs (gRNAs) for use with S. pyogenes, S. aureus and N. meningitidis Cas9s are identified using a DNA sequence searching algorithm. Guide RNA design is carried out using a custom guide RNA design software based on the public tool cas-offinder (reference:Cas-OFFinder: a fast and versatile algorithm that searches for potential off-target sites of Cas9 RNA-guided endonucleases., Bioinformatics. 2014 Feb. 17. Bae S, Park J, Kim J S. PMID:24463181). Said custom guide RNA design software scores guides after calculating their genomewide off-target propensity. Typically matches ranging from perfect matches to 7 mismatches are considered for guides ranging in length from 17 to 24. Once the off-target sites are computationally determined, an aggregate score is calculated for each guide and summarized in a tabular output using a web-interface. In addition to identifying potential gRNA sites adjacent to PAM sequences, the software also identifies all PAM adjacent sequences that differ by 1, 2, 3 or more nucleotides from the selected gRNA sites. Genomic DNA sequence for each gene is obtained from a database (e.g., the UCSC Genome browser) and sequences are screened for repeat elements using the publically available RepeatMasker program. RepeatMasker searches input DNA sequences for repeated elements and regions of low complexity. The output is a detailed annotation of the repeats present in a given query sequence.

[0625] Following identification, gRNAs are ranked into tiers based on their distance to the target site, their orthogonality or presence of a 5′ G (based on identification of close matches in the human genome containing a relavant PAM, e.g., in the case of S. pyogenes, a NGG PAM, in the case of S. aureus, NNGRR (e.g, a NNGRRT (R=A or G) or NNGRRV) PAM, and in the case of N. meningitides, a NNNNGATT or NNNNGCTT PAM). Orthogonality refers to the number of sequences in the human genome that contain a minimum number of mismatches to the target sequence. A “high level of orthogonality” or “good orthogonality” may, for example, refer to 20-mer gRNAs that have no identical sequences in the human genome besides the intended target, nor any sequences that contain one or two mismatches in the target sequence. Targeting domains with good orthogonality are selected to minimize off-target DNA cleavage.

[0626] gRNAs may be identified for both single-gRNA nuclease cleavage and for a dual-gRNA paired “nickase” strategy. gRNAs may have any of the lengths and properties described herein. Criteria for selecting gRNAs and the determination for which gRNAs can be used for which strategy is based on several considerations:
[0627] 1. gRNA pairs should be oriented on the DNA such that PAMs are facing out and cutting with the D10A Cas9 nickase will result in 5′ overhangs.
[0628] 2. An assumption that cleaving with dual nickase pairs will result in deletion of the entire intervening sequence at a reasonable frequency. However, it will also often result in indel mutations at the site of only one of the gRNAs. Candidate pair members can be tested for how efficiently they remove the entire sequence versus just causing indel mutations at the site of one gRNA.

[0629] For designing knockout strategies, in some embodiments, the targeting domains for tier 1 gRNA molecules for S. pyogenes are selected based on their distance to the target site and their orthogonality (PAM is NGG). The targeting domains for tier 1 gRNA molecules are selected based on (1) a reasonable distance to the target position, e.g., within the first 500 bp of coding sequence downstream of start codon and (2) a high level of orthogonality. For selection of tier 2 gRNAs, a high level of orthogonality is not required. Tier 3 gRNAs remove the requirement of good orthogonality and a longer sequence (e.g., the rest of the coding sequence) is scanned. Note that tiers are non-inclusive (each gRNA is listed only once). In certain instances, no gRNAs are identified based on the criteria of the particular tier.

[0630] For designing knockout strategies, in some embodiments, the targeting domain for tier 1 gRNA molecules for N. meningtidis are selected within the first 500 bp of the coding sequence and have a high level of orthogonality. The targeting domain for tier 2 gRNA molecules for N. meningtidis are selected within the first 500 bp of the coding sequence and do not require high orthogonality. The targeting domain for tier 3 gRNA molecules for N. meningtidis are selected within a remainder of coding sequence downstream of the 500 bp. Note that tiers are non-inclusive (each gRNA is listed only once). In certain instances, no gRNAs are identified based on the criteria of the particular tier.

[0631] For designing knockout strategies, in some embodiments, the targeting domain for tier 1 grNA molecules for S. aureus are selected within the first 500 bp of the coding sequence, have a high level of orthogonality, and contain a NNGRRT (R=A or G) PAM. The targeting domain for tier 2 grNA molecules for S. aureus are selected within the first 500 bp of the coding sequence, no level of orthogonality is required, and contain a NNGRRT (R=A or G) PAM. The targeting domain for tier 3 grNA molecules for S. aureus are selected within the remainder of the coding sequence downstream and contain a NNGRRT (R=A or G) PAM. The targeting domain for tier 4 grNA molecules for S. aureus are selected within the first 500 bp of the coding sequence and contain a NNGRRV PAM. The targeting domain for tier 5 grNA molecules for S. aureus are selected within the remainder of the coding sequence downstream and contain a NNGRRV PAM. Note that tiers are non-inclusive (each gRNA is listed only once). In certain instances, no gRNAs are identified based on the criteria of the particular tier.

[0632] For designing of gRNA molecules for knockdown strategies, in some embodiments, the targeting domain for tier 1 gRNA molecules for S. pyogenes are selected within the first 500 bp upstream and downstream of the transcription start site and have a high level of orthogonality. The targeting domain for tier 2 gRNA molecules for S. pyogenes are selected within the first 500 bp upstream and downstream of the transcription start site and do not require high orthogonality. The targeting domain for tier 3 gRNA molecules for S. pyogenes are selected within the additional 500 bp upstream and downstream of transcription start site (e.g., extending to 1 kb up and downstream of the transcription start site). Note that tiers are non-inclusive (each gRNA is listed only once). In certain instances, no gRNAs are identified based on the criteria of the particular tier.

[0633] For designing of gRNA molecules for knockdown strategies, in some embodiments, the targeting domain for tier 1 gRNA molecules for N. meningtidis are selected within the first 500 bp upstream and downstream of the transcription start site and have a high level of orthogonality. The targeting domain for tier 2 gRNA molecules for N. meningtidis are selected within the first 500 bp upstream and downstream of the transcription start site and do not require high orthogonality. The targeting domain for tier 3 gRNA molecules for N. meningtidis are selected within the additional 500 bp upstream and downstream of transcription start site (e.g., extending to 1 kb up and downstream of the transcription start site). Note that tiers are non-inclusive (each gRNA is listed only once). In certain instances, no gRNAs are identified based on the criteria of the particular tier.

[0634] For designing of gRNA molecules for knockdown strategies, in some embodiments, the targeting domain for tier 1 gRNA molecules for S. aureus are selected within 500 bp upstream and downstream of transcription start site, a high level of orthogonality and PAM is NNGRRT (R=A or G). The targeting domain for tier 2 gRNA molecules for S. aureus are selected within 500 bp upstream and downstream of transcription start site, no orthogonality requirement and PAM is NNGRRT (R=A or G). The targeting domain for tier 3 gRNA molecules for S. aureus are selected within the additional 500 bp upstream and downstream of transcription start site (e.g., extending to 1 kb up and downstream of the transcription start site) and PAM is NNGRRT (R=A or G). The targeting domain for tier 4 gRNA molecules for S. aureus are selected within 500 bp upstream and downstream of transcription start site and PAM is NNGRRV. The targeting domain for tier 5 gRNA molecules for S. aureus are selected within the additional 500 bp upstream and downstream of transcription start site (extending to 1 kb up and downstream of the transcription start site) and PAM is NNGRRV. Note that tiers are non-inclusive (each gRNA is listed only once). In certain instances, no gRNAs are identified based on the criteria of the particular tier.

### III. Cas Molecules

[0635] Cas molecules(e.g., Cas9 molecules) of a variety of species can be used in the methods and compositions described herein. While the S. pyogenes, S. aureus, N. meningitidis, and S. thermophilus Cas9 molecules are the subject of much of the disclosure herein, Cas molecules (e.g., Cas9 molecules) of, derived from, or based on the Cas proteins of other species listed herein can be used as well. In other words, while the much of the description herein uses S. pyogenes, S. aureus, N. meningitidis, and S. thermophilus Cas9 molecules, Cas molecules from the other species can replace them. Such species include but are not limited to: Acidovorax avenae, Actinobacillus pleuropneumonias, Actinobacillus succinogenes, Actinobacillus suis, Actinomyces sp., Cycliphilusdenitrificans, Aminomonas paucivorans, Bacillus cereus, Bacillus smithii, Bacillus thuringiensis, Bacteroides sp., Blastopirellula marina, Bradyrhizobium sp., Brevibacillus laterosporus, Campylobacter coli, Campylobacter jejuni, Campylobacter lari, Candidatus puniceispirillum, Clostridium cellulolyticum, Clostridium perfringens, Corynebacterium accolens, Corynebacterium diphtheria, Corynebacterium matruchotii, Dinoroseobacter shibae, Eubacterium dolichum, Gammaproteobacterium, Gluconacetobacter diazotrophicus, Haemophilus parainfluenzae, Haemophilus sputorum, Helicobacter canadensis, Helicobacter cinaedi, Helicobacter mustelae, Ilyobacter polytropus, Kingella kingae, Lactobacillus crispatus, Listeria ivanovii, Listeria monocytogenes, Listeriaceae bacterium, Methylocystis sp., Methylosinus trichosporium, Mobiluncus mulieris, Neisseria bacilliformis, Neisseria cinerea, Neisseria flavescens, Neisseria lactamica, Neisseria meningitidis, Neisseria sp., Neisseria wadsworthii, Nitrosomonas sp., Parvibaculum lavamentivorans, Pasteurella multocida, Phascolarctobacterium succinatutens, Ralstonia syzygii, Rhodopseudomonas palustris, Rhodovulum sp., Simonsiella muelleri, Sphingomonas sp., Sporolactobacillus vineae, Staphylococcus aureus, Staphylococcus lugdunensis, Streptococcus sp., Subdoligranulum sp., Tistrella mobilis, Treponema sp., or Verminephrobacter eiseniae.

[0636] A Cas-like molecule (e.g., Cas9-like molecule), or Cas-like polypeptide (e.g., Cas9-like polypeptide), as those terms are used herein, refer to a molecule or polypeptide that can interact with a gRNA molecule and, in concert with the gRNA molecule, home or localize to a site which comprises a target domain and PAM sequence. For example, Cas9 molecule and Cas9 polypeptide, as those terms are used herein, refer to naturally occurring Cas9 molecules and to engineered, altered, or modified Cas9 molecules or Cas9 polypeptides that differ, e.g., by at least one amino acid residue, from a reference sequence, e.g., the most similar naturally occurring Cas9 molecule or a sequence of Table 100.

[0637] Cas9 Domains

[0638] Crystal structures have been determined for two different naturally occurring bacterial Cas9 molecules (Jinek et al., Science, 343(6176):1247997, 2014) and for S. pyogenes Cas9 with a guide RNA (e.g., a synthetic fusion of crRNA and tracrRNA) (Nishimasu et al., Cell, 156:935-949, 2014; and Anders et al., Nature, 2014, doi: 10.1038/nature13579).

[0639] A naturally occurring Cas9 molecule comprises two lobes: a recognition (REC) lobe and a nuclease (NUC) lobe; each of which further comprises domains described herein. FIGS. 8A-8B provide a schematic of the organization of important Cas9 domains in the primary structure. The domain nomenclature and the numbering of the amino acid residues encompassed by each domain used throughout this disclosure is as described in Nishimasu et al. The numbering of the amino acid residues is with reference to Cas9 from S. pyogenes. FIGS. 9A-9B show schematic representations of the domain organization of S. pyogenes Cas9.

[0640] The REC lobe comprises the arginine-rich bridge helix (BH), the REC1 domain, and the REC2 domain. The REC lobe does not share structural similarity with other known proteins, indicating that it is a Cas9-specific functional domain. The BH domain is a long α-helix and arginine rich region and comprises amino acids 60-93 of the sequence of S. pyogenes Cas9. The REC1 domain is important for recognition of the repeat:anti-repeat duplex, e.g., of a gRNA or a tracrRNA, and is therefore critical for Cas9 activity by recognizing the target sequence. The REC1 domain comprises two REC1 motifs at amino acids 94 to 179 and 308 to 717 of the sequence of S. pyogenes Cas9. These two REC1 domains, though separated by the REC2 domain in the linear primary structure, assemble in the tertiary structure to form the REC1 domain. The REC2 domain, or parts thereof, may also play a role in the recognition of the repeat:anti-repeat duplex. The REC2 domain comprises amino acids 180-307 of the sequence of S. pyogenes Cas9.

[0641] The NUC lobe comprises the RuvC domain (also referred to herein as RuvC-like domain), the HNH domain (also referred to herein as HNH-like domain), and the PAM-interacting (PI) domain. The RuvC domain shares structural similarity to retroviral integrase superfamily members and cleaves a single strand, e.g., the non-complementary strand of the target nucleic acid molecule. The RuvC domain is assembled from the three split RuvC motifs (RuvC I, RuvCII, and RuvCIII, which are often commonly referred to in the art as RuvCI domain, or N-terminal RuvC domain, RuvCII domain, and RuvCIII domain) at amino acids 1-59, 718-769, and 909-1098, respectively, of the sequence of S. pyogenes Cas9. Similar to the REC1 domain, the three RuvC motifs are linearly separated by other domains in the primary structure, however in the tertiary structure, the three RuvC motifs assemble and form the RuvC domain. The HNH domain shares structural similarity with HNH endonucleases, and cleaves a single strand, e.g., the complementary strand of the target nucleic acid molecule. The HNH domain lies between the RuvC II-III motifs and comprises amino acids 775-908 of the sequence of S. pyogenes Cas9. The PI domain interacts with the PAM of the target nucleic acid molecule, and comprises amino acids 1099-1368 of the sequence of S. pyogenes Cas9.

[0642] A RuvC-like Domain and an HNH-like Domain

[0643] In an embodiment, a Cas9 molecule or Cas9 polypeptide comprises an HNH-like domain and a RuvC-like domain. In an embodiment, cleavage activity is dependent on a RuvC-like domain and an HNH-like domain. A Cas9 molecule or Cas9 polypeptide, e.g., an eaCas9 molecule or eaCas9 polypeptide, can comprise one or more of the following domains: a RuvC-like domain and an HNH-like domain. In an embodiment, a Cas9 molecule or Cas9 polypeptide is an eaCas9 molecule or eaCas9 polypeptide and the eaCas9 molecule or eaCas9 polypeptide comprises a RuvC-like domain, e.g., a RuvC-like domain described below, and/or an HNH-like domain, e.g., an HNH-like domain described below.

[0644] RuvC-like Domains

[0645] In an embodiment, a RuvC-like domain cleaves, a single strand, e.g., the non-complementary strand of the target nucleic acid molecule. The Cas9 molecule or Cas9 polypeptide can include more than one RuvC-like domain (e.g., one, two, three or more RuvC-like domains). In an embodiment, a RuvC-like domain is at least 5, 6, 7, 8 amino acids in length but not more than 20, 19, 18, 17, 16 or 15 amino acids in length. In an embodiment, the Cas9 molecule or Cas9 polypeptide comprises an N-terminal RuvC-like domain of about 10 to 20 amino acids, e.g., about 15 amino acids in length.

[0646] N-Terminal RuvC-like Domains

[0647] Some naturally occurring Cas9 molecules comprise more than one RuvC-like domain with cleavage being dependent on the N-terminal RuvC-like domain. Accordingly, Cas9 molecules or Cas9 polypeptide can comprise an N-terminal RuvC-like domain. Exemplary N-terminal RuvC-like domains are described below.

[0648] In an embodiment, an eaCas9 molecule or eaCas9 polypeptide comprises an N-terminal RuvC-like domain comprising an amino acid sequence of formula I:

(SEQ ID NO: 8)

D-X1-G-X2-X3-X4-X5-G-X6-X7-X8-X9,

[0649] wherein,
[0650] X1 is selected from I, V, M, L and T (e.g., selected from I, V, and L);
[0651] X2 is selected from T, I, V, S, N, Y, E and L (e.g., selected from T, V, and I);
[0652] X3 is selected from N, S, G, A, D, T, R, M and F (e.g., A or N);
[0653] X4 is selected from S, Y, N and F (e.g., S);
[0654] X5 is selected from V, I, L, C, T and F (e.g., selected from V, I and L);
[0655] X6 is selected from W, F, V, Y, S and L (e.g., W);
[0656] X7 is selected from A, S, C, V and G (e.g., selected from A and S);
[0657] X8 is selected from V, I, L, A, M and H (e.g., selected from V, I, M and L); and
[0658] X9 is selected from any amino acid or is absent, designated by Δ (e.g., selected from T, V, I, L, A, F, S, A, Y, M and R, or, e.g., selected from T, V, I, L and Δ).

[0659] In an embodiment, the N-terminal RuvC-like domain differs from a sequence of SEQ ID NO:8, by as many as 1 but no more than 2, 3, 4, or 5 residues.

[0660] In embodiment, the N-terminal RuvC-like domain is cleavage competent.

[0661] In embodiment, the N-terminal RuvC-like domain is cleavage incompetent.

[0662] In an embodiment, a eaCas9 molecule or eaCas9 polypeptide comprises an N-terminal RuvC-like domain comprising an amino acid sequence of formula II:

(SEQ ID NO: 9)

D-X1-G-X2-X3-S-X5-G-X6-X7-X8-X9,

[0663] wherein
[0664] X1 is selected from I, V, M, L and T (e.g., selected from I, V, and L);
[0665] X2 is selected from T, I, V, S, N, Y, E and L (e.g., selected from T, V, and I);
[0666] X3 is selected from N, S, G, A, D, T, R, M and F (e.g., A or N);
[0667] X5 is selected from V, I, L, C, T and F (e.g., selected from V, I and L);
[0668] X6 is selected from W, F, V, Y, S and L (e.g., W);
[0669] X7 is selected from A, S, C, V and G (e.g., selected from A and S);
[0670] X8 is selected from V, I, L, A, M and H (e.g., selected from V, I, M and L); and
[0671] X9 is selected from any amino acid or is absent (e.g., selected from T, V, I, L, Δ, F, S, A, Y, M and R or selected from e.g., T, V, I, L and Δ).

[0672] In an embodiment, the N-terminal RuvC-like domain differs from a sequence of SEQ ID NO:9 by as many as 1 but no more than 2, 3, 4, or 5 residues.

[0673] In an embodiment, the N-terminal RuvC-like domain comprises an amino acid sequence of formula III:

(SEQ ID NO: 10)

D-I-G-X2-X3-S-V-G-W-A-X8-X9,

[0674] wherein
[0675] X2 is selected from T, I, V, S, N, Y, E and L (e.g., selected from T, V, and I);
[0676] X3 is selected from N, S, G, A, D, T, R, M and F (e.g., A or N);
[0677] X8 is selected from V, I, L, A, M and H (e.g., selected from V, I, M and L); and
[0678] X9 is selected from any amino acid or is absent (e.g., selected from T, V, I, L, Δ, F, S, A, Y, M and R or selected from e.g., T, V, I, L and Δ).

[0679] In an embodiment, the N-terminal RuvC-like domain differs from a sequence of SEQ ID NO:10 by as many as 1 but no more than, 2, 3, 4, or 5 residues.

[0680] In an embodiment, the N-terminal RuvC-like domain comprises an amino acid sequence of formula III:

(SEQ ID NO: 11)

D-I-G-T-N-S-V-G-W-A-V-X,

[0681] wherein
[0682] X is a non-polar alkyl amino acid or a hydroxyl amino acid, e.g., X is selected from V, I, L and T (e.g., the eaCas9 molecule can comprise an N-terminal RuvC-like domain shown in FIGS. 2A-2G (is depicted as Y)).

[0683] In an embodiment, the N-terminal RuvC-like domain differs from a sequence of SEQ ID NO:11 by as many as 1 but no more than, 2, 3, 4, or 5 residues.

[0684] In an embodiment, the N-terminal RuvC-like domain differs from a sequence of an N-terminal RuvC like domain disclosed herein, e.g., in FIGS. 3A-3B or FIGS. 7A-7B, as many as 1 but no more than 2, 3, 4, or 5 residues. In an embodiment, 1, 2, or all 3 of the highly conserved residues identified in FIGS. 3A-3B or FIGS. 7A-7B are present.

[0685] In an embodiment, the N-terminal RuvC-like domain differs from a sequence of an N-terminal RuvC-like domain disclosed herein, e.g., in FIGS. 4A-4B or FIGS. 7A-7B, as many as 1 but no more than 2, 3, 4, or 5 residues. In an embodiment, 1, 2, 3 or all 4 of the highly conserved residues identified in FIGS. 4A-4B or FIGS. 7A-7B are present.

[0686] Additional RuvC-like Domains

[0687] In addition to the N-terminal RuvC-like domain, the Cas9 molecule or Cas9 polypeptide, e.g., an eaCas9 molecule or eaCas9 polypeptide, can comprise one or more additional RuvC-like domains. In an embodiment, the Cas9 molecule or Cas9 polypeptide can comprise two additional RuvC-like domains. Preferably, the additional RuvC-like domain is at least 5 amino acids in length and, e.g., less than 15 amino acids in length, e.g., 5 to 10 amino acids in length, e.g., 8 amino acids in length.

[0688] An additional RuvC-like domain can comprise an amino acid sequence:

(SEQ ID NO: 12)

I-X1-X2-E-X3-A-R-E,

[0689] wherein
[0690] X1 is V or H,
[0691] X2 is I, L or V (e.g., I or V); and
[0692] X3 is M or T.

[0693] In an embodiment, the additional RuvC-like domain comprises the amino acid sequence:

(SEQ ID NO: 13)

I-V-X2-E-M-A-R-E,

[0694] wherein
[0695] X2 is I, L or V (e.g., I or V) (e.g., the eaCas9 molecule or eaCas9 polypeptide can comprise an additional RuvC-like domain shown in FIGS. 2A-2G or FIGS. 7A-7B (depicted as B)).

[0696] An additional RuvC-like domain can comprise an amino acid sequence:

(SEQ ID NO: 14)

H-H-A-X1-D-A-X2-X3,

[0697] wherein
[0698] X1 is H or L;
[0699] X2 is R or V; and
[0700] X3 is E or V.

[0701] In an embodiment, the additional RuvC-like domain comprises the amino acid sequence:

(SEQ ID NO: 15)

H-H-A-H-D-A-Y-L.

[0702] In an embodiment, the additional RuvC-like domain differs from a sequence of SEQ ID NO:12, 13, 14 or 15 by as many as 1 but no more than 2, 3, 4, or 5 residues.

[0703] In some embodiments, the sequence flanking the N-terminal RuvC-like domain is a sequence of formula V:

(SEQ ID NO: 16)

K-X1′-Y-X2′-X3′-X4′-Z-T-D-X9′-Y,

[0704] wherein
[0705] X1′ is selected from K and P,
[0706] X2′ is selected from V, L, I, and F (e.g., V, I and L);
[0707] X3′ is selected from G, A and S (e.g., G),
[0708] X4′ is selected from L, I, V and F (e.g., L);
[0709] X9′ is selected from D, E, N and Q; and
[0710] Z is an N-terminal RuvC-like domain, e.g., as described above.

[0711] HNH-like Domains

[0712] In an embodiment, an HNH-like domain cleaves a single stranded complementary domain, e.g., a complementary strand of a double stranded nucleic acid molecule. In an embodiment, an HNH-like domain is at least 15, 20, 25 amino acids in length but not more than 40, 35 or 30 amino acids in length, e.g., 20 to 35 amino acids in length, e.g., 25 to 30 amino acids in length. Exemplary HNH-like domains are described below.

[0713] In an embodiment, an eaCas9 molecule or eaCas9 polypeptide comprises an HNH-like domain having an amino acid sequence of formula VI:

(SEQ ID NO: 17)

X1-X2-X3-H-X4-X5-P-X6-X7-X8-X9-X10-X11-X12-X13-
X14-X15-N-X16-X17-X18-X19-X20-X21-X22-X23-N,

[0714] wherein
[0715] X1 is selected from D, E, Q and N (e.g., D and E);
[0716] X2 is selected from L, I, R, Q, V, M and K;
[0717] X3 is selected from D and E;
[0718] X4 is selected from I, V, T, A and L (e.g., A, I and V);
[0719] X5 is selected from V, Y, I, L, F and W (e.g., V, I and L);
[0720] X6 is selected from Q, H, R, K, Y, I, L, F and W;
[0721] X7 is selected from S, A, D, T and K (e.g., S and A);
[0722] X8 is selected from F, L, V, K, Y, M, I, R, A, E, D and Q (e.g., F);
[0723] X9 is selected from L, R, T, I, V, S, C, Y, K, F and G;
[0724] X10 is selected from K, Q, Y, T, F, L, W, M, A, E, G, and S;
[0725] X11 is selected from D, S, N, R, L and T (e.g., D);
[0726] X12 is selected from D, N and S;
[0727] X13 is selected from S, A, T, G and R (e.g., S);
[0728] X14 is selected from I, L, F, S, R, Y, Q, W, D, K and H (e.g., I, L and F);
[0729] X15 is selected from D, S, I, N, E, A, H, F, L, Q, M, G, Y and V;
[0730] X16 is selected from K, L, R, M, T and F (e.g., L, R and K);
[0731] X17 is selected from V, L, I, A and T;
[0732] X18 is selected from L, I, V and A (e.g., L and I);
[0733] X19 is selected from T, V, C, E, S and A (e.g., T and V);
[0734] X20 is selected from R, F, T, W, E, L, N, C, K, V, S, Q, I, Y, H and A;
[0735] X21 is selected from S, P, R, K, N, A, H, Q, G and L;
[0736] X22 is selected from D, G, T, N, S, K, A, I, E, L, Q, R and Y; and
[0737] X23 is selected from K, V, A, E, Y, I, C, L, S, T, G, K, M, D and F.

[0738] In an embodiment, a HNH-like domain differs from a sequence of SEQ ID NO:17 by at least one but no more than, 2, 3, 4, or 5 residues.

[0739] In an embodiment, the HNH-like domain is cleavage competent.

[0740] In an embodiment, the HNH-like domain is cleavage incompetent.

[0741] In an embodiment, an eaCas9 molecule or eaCas9 polypeptide comprises an HNH-like domain comprising an amino acid sequence of formula VII:

(SEQ ID NO: 18)

X1-X2-X3-H-X4-X5-P-X6-S-X8-X9-X10-D-D-S-X14-X15-N-
K-V-L-X19-X20-X21-X22-X23-N,

[0742] wherein
[0743] X1 is selected from D and E;
[0744] X2 is selected from L, I, R, Q, V, M and K;
[0745] X3 is selected from D and E;
[0746] X4 is selected from I, V, T, A and L (e.g., A, I and V);
[0747] X5 is selected from V, Y, I, L, F and W (e.g., V, I and L);
[0748] X6 is selected from Q, H, R, K, Y, I, L, F and W;
[0749] X8 is selected from F, L, V, K, Y, M, I, R, A, E, D and Q (e.g., F);
[0750] X9 is selected from L, R, T, I, V, S, C, Y, K, F and G;
[0751] X10 is selected from K, Q, Y, T, F, L, W, M, A, E, G, and S;
[0752] X14 is selected from I, L, F, S, R, Y, Q, W, D, K and H (e.g., I, L and F);
[0753] X15 is selected from D, S, I, N, E, A, H, F, L, Q, M, G, Y and V;
[0754] X19 is selected from T, V, C, E, S and A (e.g., T and V);
[0755] X20 is selected from R, F, T, W, E, L, N, C, K, V, S, Q, I, Y, H and A;
[0756] X21 is selected from S, P, R, K, N, A, H, Q, G and L;
[0757] X22 is selected from D, G, T, N, S, K, A, I, E, L, Q, R and Y; and
[0758] X23 is selected from K, V, A, E, Y, I, C, L, S, T, G, K, M, D and F.

[0759] In an embodiment, the HNH-like domain differs from a sequence of SEQ ID NO:18 by 1, 2, 3, 4, or 5 residues.

[0760] In an embodiment, an eaCas9 molecule or eaCas9 polypeptide comprises an HNH-like domain comprising an amino acid sequence of formula VII:

(SEQ ID NO: 19)

X1-V-X3-H-I-V-P-X6-S-X8-X9-X10-D-D-S-X14-X15-N-K-
V-L-T-X20-X21-X22-X23-N,

[0761] wherein
[0762] X1 is selected from D and E;
[0763] X3 is selected from D and E;
[0764] X6 is selected from Q, H, R, K, Y, I, L and W;
[0765] X8 is selected from F, L, V, K, Y, M, I, R, A, E, D and Q (e.g., F);
[0766] X9 is selected from L, R, T, I, V, S, C, Y, K, F and G;
[0767] X10 is selected from K, Q, Y, T, F, L, W, M, A, E, G, and S;
[0768] X14 is selected from I, L, F, S, R, Y, Q, W, D, K and H (e.g., I, L and F);
[0769] X15 is selected from D, S, I, N, E, A, H, F, L, Q, M, G, Y and V;
[0770] X20 is selected from R, F, T, W, E, L, N, C, K, V, S, Q, I, Y, H and A;
[0771] X21 is selected from S, P, R, K, N, A, H, Q, G and L;
[0772] X22 is selected from D, G, T, N, S, K, A, I, E, L, Q, R and Y; and
[0773] X23 is selected from K, V, A, E, Y, I, C, L, S, T, G, K, M, D and F.

[0774] In an embodiment, the HNH-like domain differs from a sequence of SEQ ID NO:19 by 1, 2, 3, 4, or 5 residues.

[0775] In an embodiment, an eaCas9 molecule or eaCas9 polypeptide comprises an HNH-like domain having an amino acid sequence of formula VIII:

(SEQ ID NO: 20)

D-X2-D-H-I-X5-P-Q-X7-F-X9-X10-D-X12-S-I-D-N-X16-V-
L-X19-X20-S-X22-X23-N,

[0776] wherein
[0777] X2 is selected from I and V;
[0778] X5 is selected from I and V;
[0779] X7 is selected from A and S;
[0780] X9 is selected from I and L;
[0781] X10 is selected from K and T;
[0782] X12 is selected from D and N;
[0783] X16 is selected from R, K and L; X19 is selected from T and V;
[0784] X20 is selected from S and R;
[0785] X22 is selected from K, D and A; and
[0786] X23 is selected from E, K, G and N (e.g., the eaCas9 molecule or eaCas9 polypeptide can comprise an HNH-like domain as described herein).

[0787] In an embodiment, the HNH-like domain differs from a sequence of SEQ ID NO:20 by as many as 1 but no more than 2, 3, 4, or 5 residues.

[0788] In an embodiment, an eaCas9 molecule or eaCas9 polypeptide comprises the amino acid sequence of formula IX:

(SEQ ID NO: 21)

L-Y-Y-L-Q-N-G-X1′-D-M-Y-X2′-X3′-X4′-X5′-L-D-I-X6′-
X7′-L-S-X8′-Y-Z-N-R-X9′-K-X10′-D-X11′-V-P,

[0789] wherein
[0790] X1′ is selected from K and R;
[0791] X2′ is selected from V and T;
[0792] X3′ is selected from G and D;
[0793] X4′ is selected from E, Q and D;
[0794] X5′ is selected from E and D;
[0795] X6′ is selected from D, N and H;
[0796] X7′ is selected from Y, R and N;
[0797] X8′ is selected from Q, D and N; X9′ is selected from G and E;
[0798] X10′ is selected from S and G;
[0799] X11′ is selected from D and N; and
[0800] Z is an HNH-like domain, e.g., as described above.

[0801] In an embodiment, the eaCas9 molecule or eaCas9 polypeptide comprises an amino acid sequence that differs from a sequence of SEQ ID NO:21 by as many as 1 but no more than 2, 3, 4, or 5 residues.

[0802] In an embodiment, the HNH-like domain differs from a sequence of an HNH-like domain disclosed herein, e.g., in FIGS. 5A-5C or FIGS. 7A-7B, as many as 1 but no more than 2, 3, 4, or 5 residues. In an embodiment, 1 or both of the highly conserved residues identified in FIGS. 5A-5C or FIGS. 7A-7B are present.

[0803] In an embodiment, the HNH -like domain differs from a sequence of an HNH-like domain disclosed herein, e.g., in FIGS. 6A-6B or FIGS. 7A-7B, as many as 1 but no more than 2, 3, 4, or 5 residues. In an embodiment, 1, 2, all 3 of the highly conserved residues identified in FIGS. 6A-6B or FIGS. 7A-7B are present.

[0804] Cas9 Activities

[0805] Nuclease and Helicase Activities

[0806] In an embodiment, the Cas9 molecule or Cas9 polypeptide is capable of cleaving a target nucleic acid molecule. Typically wild type Cas9 molecules cleave both strands of a target nucleic acid molecule. Cas9 molecules and Cas9 polypeptides can be engineered to alter nuclease cleavage (or other properties), e.g., to provide a Cas9 molecule or Cas9 peolypeptide which is a nickase, or which lacks the ability to cleave target nucleic acid. A Cas9 molecule or Cas9 polypeptide that is capable of cleaving a target nucleic acid molecule is referred to herein as an eaCas9 molecule or eaCas9 polypeptide

[0807] In an embodiment, an eaCas9 molecule or eaCas9 polypeptide comprises one or more of the following activities:

[0808] a nickase activity, i.e., the ability to cleave a single strand, e.g., the non-complementary strand or the complementary strand, of a nucleic acid molecule;

[0809] a double stranded nuclease activity, i.e., the ability to cleave both strands of a double stranded nucleic acid and create a double stranded break, which in an embodiment is the presence of two nickase activities;

[0810] an endonuclease activity;

[0811] an exonuclease activity; and

[0812] a helicase activity, i.e., the ability to unwind the helical structure of a double stranded nucleic acid.

[0813] In an embodiment, an enzymatically active or eaCas9 molecule or eaCas9 polypeptide cleaves both strands and results in a double stranded break. In an embodiment, an eaCas9 molecule cleaves only one strand, e.g., the strand to which the gRNA hybridizes to, or the strand complementary to the strand the gRNA hybridizes with. In an embodiment, an eaCas9 molecule or eaCas9 polypeptide comprises cleavage activity associated with an HNH-like domain. In an embodiment, an eaCas9 molecule or eaCas9 polypeptide comprises cleavage activity associated with an N-terminal RuvC-like domain. In an embodiment, an eaCas9 molecule or eaCas9 polypeptide comprises cleavage activity associated with an HNH-like domain and cleavage activity associated with an N-terminal RuvC-like domain. In an embodiment, an eaCas9 molecule or eaCas9 polypeptide comprises an active, or cleavage competent, HNH-like domain and an inactive, or cleavage incompetent, N-terminal RuvC-like domain. In an embodiment, an eaCas9 molecule or eaCas9 polypeptide comprises an inactive, or cleavage incompetent, HNH-like domain and an active, or cleavage competent, N-terminal RuvC-like domain.

[0814] Some Cas9 molecules or Cas9 polypeptides have the ability to interact with a gRNA molecule, and in conjunction with the gRNA molecule localize to a core target domain, but are incapable of cleaving the target nucleic acid, or incapable of cleaving at efficient rates. Cas9 molecules having no, or no substantial, cleavage activity are referred to herein as an eiCas9 molecule or eiCas9 polypeptide. For example, an eiCas9 molecule or eiCas9 polypeptide can lack cleavage activity or have substantially less, e.g., less than 20, 10, 5, 1 or 0.1% of the cleavage activity of a reference Cas9 molecule or eiCas9 polypeptide, as measured by an assay described herein.

[0815] Targeting and PAMs

[0816] A Cas9 molecule or Cas9 polypeptide, is a polypeptide that can interact with a guide RNA (gRNA) molecule and, in concert with the gRNA molecule, localizes to a site which comprises a target domain and a PAM sequence.

[0817] In an embodiment, the ability of an eaCas9 molecule or eaCas9 polypeptide to interact with and cleave a target nucleic acid is PAM sequence dependent. A PAM sequence is a sequence in the target nucleic acid. In an embodiment, cleavage of the target nucleic acid occurs upstream from the PAM sequence. EaCas9 molecules from different bacterial species can recognize different sequence motifs (e.g., PAM sequences). In an embodiment, an eaCas9 molecule of S. pyogenes recognizes the sequence motif NGG, NAG, NGA and directs cleavage of a target nucleic acid sequence 1 to 10, e.g., 3 to 5, base pairs upstream from that sequence. See, e.g., Mali et al., SCIENCE 2013; 339(6121): 823-826. In an embodiment, an eaCas9 molecule of S. thermophilus recognizes the sequence motif NGGNG and/or NNAGAAW (W=A or T) and directs cleavage of a target nucleic acid sequence 1 to 10, e.g., 3 to 5, base pairs upstream from these sequences. See, e.g., Horvath et al., SCIENCE 2010; 327(5962):167-170, and Deveau et al., J BACTERIOL 2008; 190(4): 1390-1400. In an embodiment, an eaCas9 molecule of S. mutans recognizes the sequence motif NGG and/or NAAR (R=A or G)) and directs cleavage of a core target nucleic acid sequence 1 to 10, e.g., 3 to 5 base pairs, upstream from this sequence. See, e.g., Deveau et al., J BACTERIOL 2008; 190(4): 1390-1400. In an embodiment, an eaCas9 molecule of S. aureus recognizes the sequence motif NNGRR (R=A or G) and directs cleavage of a target nucleic acid sequence 1 to 10, e.g., 3 to 5, base pairs upstream from that sequence. In an embodiment, an eaCas9 molecule of S. aureus recognizes the sequence motif NNGRRT (R=A or G) and directs cleavage of a target nucleic acid sequence 1 to 10, e.g., 3 to 5, base pairs upstream from that sequence. In an embodiment, an eaCas9 molecule of S. aureus recognizes the sequence motif NNGRRV (R=A or G) and directs cleavage of a target nucleic acid sequence 1 to 10, e.g., 3 to 5, base pairs upstream from that sequence. In an embodiment, an eaCas9 molecule of N. meningitidis recognizes the sequence motif NNNNGATT or NNNGCTT (R=A or G, V=A, G or C and directs cleavage of a target nucleic acid sequence 1 to 10, e.g., 3 to 5, base pairs upstream from that sequence. See, e.g., Hou et al., PNAS EARLY EDITION 2013, 1-6. The ability of a Cas9 molecule to recognize a PAM sequence can be determined, e.g., using a transformation assay described in Jinek et al., SCIENCE 2012 337:816. In the aforementioned embodiments, N can be any nucleotide residue, e.g., any of A, G, C or T.

[0818] As is discussed herein, Cas9 molecules can be engineered to alter the PAM specificity of the Cas9 molecule.

[0819] Exemplary naturally occurring Cas9 molecules are described in Chylinski et al., RNA Biology 2013 10:5, 727-737. Such Cas9 molecules include Cas9 molecules of a cluster 1 bacterial family, cluster 2 bacterial family, cluster 3 bacterial family, cluster 4 bacterial family, cluster 5 bacterial family, cluster 6 bacterial family, a cluster 7 bacterial family, a cluster 8 bacterial family, a cluster 9 bacterial family, a cluster 10 bacterial family, a cluster 11 bacterial family, a cluster 12 bacterial family, a cluster 13 bacterial family, a cluster 14 bacterial family, a cluster 15 bacterial family, a cluster 16 bacterial family, a cluster 17 bacterial family, a cluster 18 bacterial family, a cluster 19 bacterial family, a cluster 20 bacterial family, a cluster 21 bacterial family, a cluster 22 bacterial family, a cluster 23 bacterial family, a cluster 24 bacterial family, a cluster 25 bacterial family, a cluster 26 bacterial family, a cluster 27 bacterial family, a cluster 28 bacterial family, a cluster 29 bacterial family, a cluster 30 bacterial family, a cluster 31 bacterial family, a cluster 32 bacterial family, a cluster 33 bacterial family, a cluster 34 bacterial family, a cluster 35 bacterial family, a cluster 36 bacterial family, a cluster 37 bacterial family, a cluster 38 bacterial family, a cluster 39 bacterial family, a cluster 40 bacterial family, a cluster 41 bacterial family, a cluster 42 bacterial family, a cluster 43 bacterial family, a cluster 44 bacterial family, a cluster 45 bacterial family, a cluster 46 bacterial family, a cluster 47 bacterial family, a cluster 48 bacterial family, a cluster 49 bacterial family, a cluster 50 bacterial family, a cluster 51 bacterial family, a cluster 52 bacterial family, a cluster 53 bacterial family, a cluster 54 bacterial family, a cluster 55 bacterial family, a cluster 56 bacterial family, a cluster 57 bacterial family, a cluster 58 bacterial family, a cluster 59 bacterial family, a cluster 60 bacterial family, a cluster 61 bacterial family, a cluster 62 bacterial family, a cluster 63 bacterial family, a cluster 64 bacterial family, a cluster 65 bacterial family, a cluster 66 bacterial family, a cluster 67 bacterial family, a cluster 68 bacterial family, a cluster 69 bacterial family, a cluster 70 bacterial family, a cluster 71 bacterial family, a cluster 72 bacterial family, a cluster 73 bacterial family, a cluster 74 bacterial family, a cluster 75 bacterial family, a cluster 76 bacterial family, a cluster 77 bacterial family, or a cluster 78 bacterial family.

[0820] Exemplary naturally occurring Cas9 molecules include a Cas9 molecule of a cluster 1 bacterial family. Examples include a Cas9 molecule of: S. pyogenes (e.g., strain SF370, MGAS10270, MGAS10750, MGAS2096, MGAS315, MGAS5005, MGAS6180, MGAS9429, NZ131 and SSI-1), S. thermophilus (e.g., strain LMD-9), S. pseudoporcinus (e.g., strain SPIN 20026), S. mutans (e.g., strain UA159, NN2025), S. macacae (e.g., strain NCTC11558), S. gallolyticus (e.g., strain UCN34, ATCC BAA-2069), S. equines (e.g., strain ATCC 9812, MGCS 124), S. dysdalactiae (e.g., strain GGS 124), S. bovis (e.g., strain ATCC 700338), S. anginosus (e.g., strain F0211), S. agalactiae (e.g., strain NEM316, A909), Listeria monocytogenes (e.g., strain F6854), Listeria innocua (L. innocua, e.g., strain Clip11262), Enterococcus italicus (e.g., strain DSM 15952), or Enterococcus faecium (e.g., strain 1,231,408). Another exemplary Cas9 molecule is a Cas9 molecule of Neisseria meningitidis (Hou et al., PNAS Early Edition 2013, 1-6).

[0821] In an embodiment, a Cas9 molecule or Cas9 polypeptide, e.g., an eaCas9 molecule or eaCas9 polypeptide, comprises an amino acid sequence:

[0822] having 60%, 65%, 70%, 75%, 80%, 85%, 90%, 95%, 96%, 97%, 98% or 99% homology with;

[0823] differs at no more than, 2, 5, 10, 15, 20, 30, or 40% of the amino acid residues when compared with;

[0824] differs by at least 1, 2, 5, 10 or 20 amino acids but by no more than 100, 80, 70, 60, 50, 40 or 30 amino acids from; or

[0825] is identical to any Cas9 molecule sequence described herein, or a naturally occurring Cas9 molecule sequence, e.g., a Cas9 molecule from a species listed herein or described in Chylinski et al., RNA Biology 2013 10:5, 727-737; Hou et al., PNAS Early Edition 2013, 1-6; SEQ ID NO:1-4. In an embodiment, the Cas9 molecule or Cas9 polypeptide comprises one or more of the following activities: a nickase activity; a double stranded cleavage activity (e.g., an endonuclease and/or exonuclease activity); a helicase activity; or the ability, together with a gRNA molecule, to home to a target nucleic acid.

[0826] In an embodiment, a Cas9 molecule or Cas9 polypeptide comprises the amino acid sequence of the consensus sequence of FIGS. 2A-2G, wherein “*” indicates any amino acid found in the corresponding position in the amino acid sequence of a Cas9 molecule of S. pyogenes, S. thermophilus, S. mutans and L. innocua, and “-” indicates any amino acid. In an embodiment, a Cas9 molecule or Cas9 polypeptide differs from the sequence of the consensus sequence disclosed in FIGS. 2A-2G by at least 1, but no more than 2, 3, 4, 5, 6, 7, 8, 9, or 10 amino acid residues. In an embodiment, a Cas9 molecule or Cas9 polypeptide comprises the amino acid sequence of SEQ ID NO:7 of FIGS. 7A-7B, wherein “*” indicates any amino acid found in the corresponding position in the amino acid sequence of a Cas9 molecule of S. pyogenes, or N. meningitidis, “-” indicates any amino acid, and “-” indicates any amino acid or absent. In an embodiment, a Cas9 molecule or Cas9 polypeptide differs from the sequence of SEQ ID NO:6 or 7 disclosed in FIGS. 7A-7B by at least 1, but no more than 2, 3, 4, 5, 6, 7, 8, 9, or 10 amino acid residues.

[0827] A comparison of the sequence of a number of Cas9 molecules indicate that certain regions are conserved. These are identified below as:

[0828] region 1 (residuesl to 180, or in the case of region 1′ residues 120 to 180)

[0829] region 2 (residues360 to 480);

[0830] region 3 (residues 660 to 720);

[0831] region 4 (residues 817 to 900); and

[0832] region 5 (residues 900 to 960);

[0833] In an embodiment, a Cas9 molecule or Cas9 polypeptide comprises regions 1-5, together with sufficient additional Cas9 molecule sequence to provide a biologically active molecule, e.g., a Cas9 molecule having at least one activity described herein. In an embodiment, each of regions 1-6, independently, have, 50%, 60%, 70%, or 80% homology with the corresponding residues of a Cas9 molecule or Cas9 polypeptide described herein, e.g., a sequence from FIGS. 2A-2G or from FIGS. 7A-7B.

[0834] In an embodiment, a Cas9 molecule or Cas9 polypeptide, e.g., an eaCas9 molecule or eaCas9 polypeptide, comprises an amino acid sequence referred to as region 1:

[0835] having 50%, 60%, 70%, 80%, 85%, 90%, 95%, 96%, 97%, 98% or 99% homology with amino acids 1-180 (the numbering is according to the motif sequence in FIGS. 2A-2G; 52% of residues in the four Cas9 sequences in FIGS. 2A-2G are conserved) of the amino acid sequence of Cas9 of S. pyogenes;

[0836] differs by at least 1, 2, 5, 10 or 20 amino acids but by no more than 90, 80, 70, 60, 50, 40 or 30 amino acids from amino acids 1-180 of the amino acid sequence of Cas9 of S. pyogenes, S. thermophilus, S. mutans or L. innocua; or

[0837] is identical to 1-180 of the amino acid sequence of Cas9 of S. pyogenes, S. thermophilus, S. mutans or L. innocua.

[0838] In an embodiment, a Cas9 molecule or Cas9 polypeptide, e.g., an eaCas9 molecule or eaCas9 polypeptide, comprises an amino acid sequence referred to as region 1′:

[0839] having 55%, 60%, 65%, 70%, 75%, 80%, 85%, 90%, 95%, 96%, 97%, 98% or 99% homology with amino acids 120-180 (55% of residues in the four Cas9 sequences in FIGS. 2A-2G are conserved) of the amino acid sequence of Cas9 of S. pyogenes, S. thermophilus, S. mutans or L. innocua;

[0840] differs by at least 1, 2, or 5 amino acids but by no more than 35, 30, 25, 20 or 10 amino acids from amino acids 120-180 of the amino acid sequence of Cas9 of S. pyogenes, S. thermophilus, S. mutans or L. innocua; or

[0841] is identical to 120-180 of the amino acid sequence of Cas9 of S. pyogenes, S. thermophilus, S. mutans or L. innocua.

[0842] In an embodiment, a Cas9 molecule or Cas9 polypeptide, e.g., an eaCas9 molecule or eaCas9 polypeptide, comprises an amino acid sequence referred to as region 2:

[0843] having 50%, 55%, 60%, 65%, 70%, 75%, 80%, 85%, 90%, 95%, 96%, 97%, 98% or 99% homology with amino acids 360-480 (52% of residues in the four Cas9 sequences in FIGS. 2A-2G are conserved) of the amino acid sequence of Cas9 of S. pyogenes, S. thermophilus, S. mutans or L. innocua;

[0844] differs by at least 1, 2, or 5 amino acids but by no more than 35, 30, 25, 20 or 10 amino acids from amino acids 360-480 of the amino acid sequence of Cas9 of S. pyogenes, S. thermophilus, S. mutans or L. innocua; or

[0845] is identical to 360-480 of the amino acid sequence of Cas9 of S. pyogenes, S. thermophilus, S. mutans or L. innocua.

[0846] In an embodiment, a Cas9 molecule or Cas9 polypeptide, e.g., an eaCas9 molecule or eaCas9 polypeptide, comprises an amino acid sequence referred to as region 3:

[0847] having 55%, 60%, 65%, 70%, 75%, 80%, 85%, 90%, 95%, 96%, 97%, 98%, or 99% homology with amino acids 660-720 (56% of residues in the four Cas9 sequences in FIGS. 2A-2G are conserved) of the amino acid sequence of Cas9 of S. pyogenes, S. thermophilus, S. mutans or L. innocua;

[0848] differs by at least 1, 2, or 5 amino acids but by no more than 35, 30, 25, 20 or 10 amino acids from amino acids 660-720 of the amino acid sequence of Cas9 of S. pyogenes, S. thermophilus, S. mutans or L. innocua; or

[0849] is identical to 660-720 of the amino acid sequence of Cas9 of S. pyogenes, S. thermophilus, S. mutans or L. innocua.

[0850] In an embodiment, a Cas9 molecule or Cas9 polypeptide, e.g., an eaCas9 molecule or eaCas9 polypeptide, comprises an amino acid sequence referred to as region 4:

[0851] having 50%, 55%, 60%, 65%, 70%, 75%, 80%, 85%, 90%, 95%, 96%, 97%, 98%, or 99% homology with amino acids 817-900 (55% of residues in the four Cas9 sequences in FIGS. 2A-2G are conserved) of the amino acid sequence of Cas9 of S. pyogenes, S. thermophilus, S. mutans or L. innocua;

[0852] differs by at least 1, 2, or 5 amino acids but by no more than 35, 30, 25, 20 or 10 amino acids from amino acids 817-900 of the amino acid sequence of Cas9 of S. pyogenes, S. thermophilus, S. mutans or L. innocua; or

[0853] is identical to 817-900 of the amino acid sequence of Cas9 of S. pyogenes, S. thermophilus, S. mutans or L. innocua.

[0854] In an embodiment, a Cas9 molecule or Cas9 polypeptide, e.g., an eaCas9 molecule or eaCas9 polypeptide, comprises an amino acid sequence referred to as region 5:

[0855] having 50%, 55%, 60%, 65%, 70%, 75%, 80%, 85%, 90%, 95%, 96%, 97%, 98%, or 99% homology with amino acids 900-960 (60% of residues in the four Cas9 sequences in FIGS. 2A-2G are conserved) of the amino acid sequence of Cas9 of S. pyogenes, S. thermophilus, S. mutans or L. innocua;

[0856] differs by at least 1, 2, or 5 amino acids but by no more than 35, 30, 25, 20 or 10 amino acids from amino acids 900-960 of the amino acid sequence of Cas9 of S. pyogenes, S. thermophilus, S. mutans or L. innocua; or

[0857] is identical to 900-960 of the amino acid sequence of Cas9 of S. pyogenes, S. thermophilus, S. mutans or L. innocua.

[0858] Engineered or Altered Cas9 Molecules and Cas9 Polypeptides

[0859] Cas9 molecules and Cas9 polypeptides described herein, e.g., naturally occurring Cas9 molecules, can possess any of a number of properties, including: nickase activity, nuclease activity (e.g., endonuclease and/or exonuclease activity); helicase activity; the ability to associate functionally with a gRNA molecule; and the ability to target (or localize to) a site on a nucleic acid (e.g., PAM recognition and specificity). In an embodiment, a Cas9 molecule or Cas9 polypeptide can include all or a subset of these properties. In typical embodiments, a Cas9 molecule or Cas9 polypeptide has the ability to interact with a gRNA molecule and, in concert with the gRNA molecule, localize to a site in a nucleic acid. Other activities, e.g., PAM specificity, cleavage activity, or helicase activity can vary more widely in Cas9 molecules and Cas9 polypeptides.

[0860] Cas9 molecules include engineered Cas9 molecules and engineered Cas9 polypeptides (engineered, as used in this context, means merely that the Cas9 molecule or Cas9 polypeptide differs from a reference sequences, and implies no process or origin limitation). An engineered Cas9 molecule or Cas9 polypeptide can comprise altered enzymatic properties, e.g., altered nuclease activity, (as compared with a naturally occurring or other reference Cas9 molecule) or altered helicase activity. As discussed herein, an engineered Cas9 molecule or Cas9 polypeptide can have nickase activity (as opposed to double strand nuclease activity). In an embodiment an engineered Cas9 molecule or Cas9 polypeptide can have an alteration that alters its size, e.g., a deletion of amino acid sequence that reduces its size, e.g., without significant effect on one or more, or any Cas9 activity. In an embodiment, an engineered Cas9 molecule or Cas9 polypeptide can comprise an alteration that affects PAM recognition. E.g., an engineered Cas9 molecule can be altered to recognize a PAM sequence other than that recognized by the endogenous wild-type PI domain. In an embodiment a Cas9 molecule or Cas9 polypeptide can differ in sequence from a naturally occurring Cas9 molecule but not have significant alteration in one or more Cas9 activities.

[0861] Cas9 molecules or Cas9 polypeptides with desired properties can be made in a number of ways, e.g., by alteration of a parental, e.g., naturally occurring, Cas9 molecules or Cas9 polypeptides, to provide an altered Cas9 molecule or Cas9 polypeptide having a desired property. For example, one or more mutations or differences relative to a parental Cas9 molecule, e.g., a naturally occurring or engineered Cas9 molecule, can be introduced. Such mutations and differences comprise: substitutions (e.g., conservative substitutions or substitutions of non-essential amino acids); insertions; or deletions. In an embodiment, a Cas9 molecule or Cas9 polypeptide can comprises one or more mutations or differences, e.g., at least 1, 2, 3, 4, 5, 10, 15, 20, 30, 40 or 50 mutations but less than 200, 100, or 80 mutations relative to a reference, e.g., a parental, Cas9 molecule.

[0862] In an embodiment, a mutation or mutations do not have a substantial effect on a Cas9 activity, e.g. a Cas9 activity described herein. In an embodiment, a mutation or mutations have a substantial effect on a Cas9 activity, e.g. a Cas9 activity described herein.

[0863] Non-Cleaving and Modified-Cleavage Cas9 Molecules and Cas9 Polypeptides

[0864] In an embodiment, a Cas9 molecule or Cas9 polypeptide comprises a cleavage property that differs from naturally occurring Cas9 molecules, e.g., that differs from the naturally occurring Cas9 molecule having the closest homology. For example, a Cas9 molecule or Cas9 polypeptide can differ from naturally occurring Cas9 molecules, e.g., a Cas9 molecule of S. pyogenes, as follows: its ability to modulate, e.g., decreased or increased, cleavage of a double stranded nucleic acid (endonuclease and/or exonuclease activity), e.g., as compared to a naturally occurring Cas9 molecule (e.g., a Cas9 molecule of S. pyogenes); its ability to modulate, e.g., decreased or increased, cleavage of a single strand of a nucleic acid, e.g., a non-complementary strand of a nucleic acid molecule or a complementary strand of a nucleic acid molecule (nickase activity), e.g., as compared to a naturally occurring Cas9 molecule (e.g., a Cas9 molecule of S. pyogenes); or the ability to cleave a nucleic acid molecule, e.g., a double stranded or single stranded nucleic acid molecule, can be eliminated.

[0865] Modified Cleavage eaCas9 Molecules and eaCas9 Polypeptides

[0866] In an embodiment, an eaCas9 molecule or eaCas9 polypeptide comprises one or more of the following activities: cleavage activity associated with an N-terminal RuvC-like domain; cleavage activity associated with an HNH-like domain; cleavage activity associated with an HNH-like domain and cleavage activity associated with an N-terminal RuvC-like domain.

[0867] In an embodiment, an eaCas9 molecule or eaCas9 polypeptide comprises an active, or cleavage competent, HNH-like domain (e.g., an HNH-like domain described herein, e.g., SEQ ID NO:17, SEQ ID NO:18, SEQ ID NO:19, SEQ ID NO:20, or SEQ ID NO:21) and an inactive, or cleavage incompetent, N-terminal RuvC-like domain. An exemplary inactive, or cleavage incompetent N-terminal RuvC-like domain can have a mutation of an aspartic acid in an N-terminal RuvC-like domain, e.g., an aspartic acid at position 9 of the consensus sequence disclosed in FIGS. 2A-2G or an aspartic acid at position 10 of SEQ ID NO:7, e.g., can be substituted with an alanine. In an embodiment, the eaCas9 molecule or eaCas9 polypeptide differs from wild type in the N-terminal RuvC-like domain and does not cleave the target nucleic acid, or cleaves with significantly less efficiency, e.g., less than 20, 10, 5, 1 or 0.1% of the cleavage activity of a reference Cas9 molecule, e.g., as measured by an assay described herein. The reference Cas9 molecule can by a naturally occurring unmodified Cas9 molecule, e.g., a naturally occurring Cas9 molecule such as a Cas9 molecule of S. pyogenes, or S. thermophilus. In an embodiment, the reference Cas9 molecule is the naturally occurring Cas9 molecule having the closest sequence identity or homology.

[0868] In an embodiment, an eaCas9 molecule or eaCas9 polypeptide comprises an inactive, or cleavage incompetent, HNH domain and an active, or cleavage competent, N-terminal RuvC-like domain (e.g., an N-terminal RuvC-like domain described herein, e.g., SEQ ID NO:8, SEQ ID NO:9, SEQ ID NO:10, SEQ ID NO:11, SEQ ID NO:12, SEQ ID NO:13, SEQ ID NO:14, SEQ ID NO:15, or SEQ ID NO:16). Exemplary inactive, or cleavage incompetent HNH-like domains can have a mutation at one or more of: a histidine in an HNH-like domain, e.g., a histidine shown at position 856 of FIGS. 2A-2G, e.g., can be substituted with an alanine; and one or more asparagines in an HNH-like domain, e.g., an asparagine shown at position 870 of FIGS. 2A-2G and/or at position 879 of FIGS. 2A-2G, e.g., can be substituted with an alanine. In an embodiment, the eaCas9 differs from wild type in the HNH-like domain and does not cleave the target nucleic acid, or cleaves with significantly less efficiency, e.g., less than 20, 10, 5, 1 or 0.1% of the cleavage activity of a reference Cas9 molecule, e.g., as measured by an assay described herein. The reference Cas9 molecule can by a naturally occurring unmodified Cas9 molecule, e.g., a naturally occurring Cas9 molecule such as a Cas9 molecule of S. pyogenes, or S. thermophilus. In an embodiment, the reference Cas9 molecule is the naturally occurring Cas9 molecule having the closest sequence identity or homology.

[0869] In an embodiment, an eaCas9 molecule or eaCas9 polypeptide comprises an inactive, or cleavage incompetent, HNH domain and an active, or cleavage competent, N-terminal RuvC-like domain (e.g., an N-terminal RuvC-like domain described herein, e.g., SEQ ID NO:8, SEQ ID NO:9, SEQ ID NO:10, SEQ ID NO:11, SEQ ID NO:12, SEQ ID NO:13, SEQ ID NO:14, SEQ ID NO:15, or SEQ ID NO:16). Exemplary inactive, or cleavage incompetent HNH-like domains can have a mutation at one or more of: a histidine in an HNH-like domain, e.g., a histidine shown at position 856 of FIGS. 2A-2G, e.g., can be substituted with an alanine; and one or more asparagines in an HNH-like domain, e.g., an asparagine shown at position 870 of FIGS. 2A-2G and/or at position 879 of FIGS. 2A-2G, e.g., can be substituted with an alanine. In an embodiment, the eaCas9 differs from wild type in the HNH-like domain and does not cleave the target nucleic acid, or cleaves with significantly less efficiency, e.g., less than 20, 10, 5, 1 or 0.1% of the cleavage activity of a reference Cas9 molecule, e.g., as measured by an assay described herein. The reference Cas9 molecule can by a naturally occurring unmodified Cas9 molecule, e.g., a naturally occurring Cas9 molecule such as a Cas9 molecule of S. pyogenes, or S. thermophilus. In an embodiment, the reference Cas9 molecule is the naturally occurring Cas9 molecule having the closest sequence identity or homology.

[0870] Alterations in the Ability to Cleave One or both Strands of a Target Nucleic Acid

[0871] In an embodiment, exemplary Cas9 activities comprise one or more of PAM specificity, cleavage activity, and helicase activity. A mutation(s) can be present, e.g., in: one or more RuvC-like domain, e.g., an N-terminal RuvC-like domain; an HNH-like domain; a region outside the RuvC-like domains and the HNH-like domain. In some embodiments, a mutation(s) is present in a RuvC-like domain, e.g., an N-terminal RuvC-like. In some embodiments, a mutation(s) is present in an HNH-like domain. In some embodiments, mutations are present in both a RuvC-like domain, e.g., an N-terminal RuvC-like domain, and an HNH-like domain.

[0872] Exemplary mutations that may be made in the RuvC domain or HNH domain with reference to the S. pyogenes sequence include: D10A, E762A, H840A, N854A, N863A and/or D986A.

[0873] In an embodiment, a Cas9 molecule or Cas9 polypeptide is an eiCas9 molecule or eiCas9 polypeptide comprising one or more differences in a RuvC domain and/or in an HNH domain as compared to a reference Cas9 molecule, and the eiCas9 molecule or eiCas9 polypeptide does not cleave a nucleic acid, or cleaves with significantly less efficiency than does wildype, e.g., when compared with wild type in a cleavage assay, e.g., as described herein, cuts with less than 50, 25, 10, or 1% of a reference Cas9 molecule, as measured by an assay described herein.

[0874] Whether or not a particular sequence, e.g., a substitution, may affect one or more activity, such as targeting activity, cleavage activity, etc, can be evaluated or predicted, e.g., by evaluating whether the mutation is conservative or by the method described in Section IV. In an embodiment, a “non-essential” amino acid residue, as used in the context of a Cas9 molecule, is a residue that can be altered from the wild-type sequence of a Cas9 molecule, e.g., a naturally occurring Cas9 molecule, e.g., an eaCas9 molecule, without abolishing or more preferably, without substantially altering a Cas9 activity (e.g., cleavage activity), whereas changing an “essential” amino acid residue results in a substantial loss of activity (e.g., cleavage activity).

[0875] In an embodiment, a Cas9 molecule or Cas9 polypeptide comprises a cleavage property that differs from naturally occurring Cas9 molecules, e.g., that differs from the naturally occurring Cas9 molecule having the closest homology. For example, a Cas9 molecule or Cas9 polypeptide can differ from naturally occurring Cas9 molecules, e.g., a Cas9 molecule of S. aureus, S. pyogenes, or C. jejuni as follows: its ability to modulate, e.g., decreased or increased, cleavage of a double stranded break (endonuclease and/or exonuclease activity), e.g., as compared to a naturally occurring Cas9 molecule (e.g., a Cas9 molecule of S. aureus, S. pyogenes, or C. jejuni); its ability to modulate, e.g., decreased or increased, cleavage of a single strand of a nucleic acid, e.g., a non-complementary strand of a nucleic acid molecule or a complementary strand of a nucleic acid molecule (nickase activity), e.g., as compared to a naturally occurring Cas9 molecule (e.g., a Cas9 molecule of S. aureus, S. pyogenes, or C. jejuni); or the ability to cleave a nucleic acid molecule, e.g., a double stranded or single stranded nucleic acid molecule, can be eliminated.

[0876] In an embodiment, the altered Cas9 molecule or Cas9 polypeptide is an eaCas9 molecule or eaCas9 polypeptide comprising one or more of the following activities: cleavage activity associated with a RuvC domain; cleavage activity associated with an HNH domain; cleavage activity associated with an HNH domain and cleavage activity associated with a RuvC domain.

[0877] In an embodiment, the altered Cas9 molecule or Cas9 polypeptide is an eiCas9 molecule or eaCas9 polypeptide which does not cleave a nucleic acid molecule (either double stranded or single stranded nucleic acid molecules) or cleaves a nucleic acid molecule with significantly less efficiency, e.g., less than 20, 10, 5, 1 or 0.1% of the cleavage activity of a reference Cas9 molecule, e.g., as measured by an assay described herein. The reference Cas9 molecule can be a naturally occurring unmodified Cas9 molecule, e.g., a naturally occurring Cas9 molecule such as a Cas9 molecule of S. pyogenes, S. thermophilus, S. aureus, C. jejuni or N. meningitidis. In an embodiment, the reference Cas9 molecule is the naturally occurring Cas9 molecule having the closest sequence identity or homology. In an embodiment, the eiCas9 molecule or eiCas9 polypeptide lacks substantial cleavage activity associated with a RuvC domain and cleavage activity associated with an HNH domain.

[0878] In an embodiment, the altered Cas9 molecule or Cas9 polypeptide is an eaCas9 molecule or eaCas9 polypeptide comprising the fixed amino acid residues of S. pyogenes shown in the consensus sequence disclosed in FIGS. 2A-2G, and has one or more amino acids that differ from the amino acid sequence of S. pyogenes (e.g., has a substitution) at one or more residue (e.g., 2, 3, 5, 10, 15, 20, 30, 50, 70, 80, 90, 100, 200 amino acid residues) represented by an “-” in the consensus sequence disclosed in FIGS. 2A-2G or SEQ ID NO:7.

[0879] In an embodiment, the altered Cas9 molecule or Cas9 polypeptide comprises a sequence in which:

[0880] the sequence corresponding to the fixed sequence of the consensus sequence disclosed in FIGS. 2A-2G differs at no more than 1, 2, 3, 4, 5, 10, 15, or 20% of the fixed residues in the consensus sequence disclosed in FIGS. 2A-2G;

[0881] the sequence corresponding to the residues identified by “*” in the consensus sequence disclosed in FIGS. 2A-2G differ at no more than 1, 2, 3, 4, 5, 10, 15, 20, 25, 30, 35, or 40% of the “*” residues from the corresponding sequence of naturally occurring Cas9 molecule, e.g., an S. pyogenes Cas9 molecule; and,

[0882] the sequence corresponding to the residues identified by “-” in the consensus sequence disclosed in FIGS. 2A-2G differ at no more than 5, 10, 15, 20, 25, 30, 35, 40, 45, 55, or 60% of the “-” residues from the corresponding sequence of naturally occurring Cas9 molecule, e.g., an S. pyogenes Cas9 molecule.

[0883] In an embodiment, the altered Cas9 molecule or Cas9 polypeptide is an eaCas9 molecule or eaCas9 polypeptide comprising the fixed amino acid residues of S. thermophilus shown in the consensus sequence disclosed in FIGS. 2A-2G, and has one or more amino acids that differ from the amino acid sequence of S. thermophilus (e.g., has a substitution) at one or more residue (e.g., 2, 3, 5, 10, 15, 20, 30, 50, 70, 80, 90, 100, 200 amino acid residues) represented by an “-” in the consensus sequence disclosed in FIGS. 2A-2G.

[0884] In an embodiment the altered Cas9 molecule or Cas9 polypeptide comprises a sequence in which:

[0885] the sequence corresponding to the fixed sequence of the consensus sequence disclosed in FIGS. 2A-2G differs at no more than 1, 2, 3, 4, 5, 10, 15, or 20% of the fixed residues in the consensus sequence disclosed in FIGS. 2A-2G;

[0886] the sequence corresponding to the residues identified by “*”in the consensus sequence disclosed in FIGS. 2A-2G differ at no more than 1, 2, 3, 4, 5, 10, 15, 20, 25, 30, 35, or 40% of the “*” residues from the corresponding sequence of naturally occurring Cas9 molecule, e.g., an S. thermophilus Cas9 molecule; and,

[0887] the sequence corresponding to the residues identified by “-” in the consensus sequence disclosed in FIGS. 2A-2G differ at no more than 5, 10, 15, 20, 25, 30, 35, 40, 45, 55, or 60% of the “-” residues from the corresponding sequence of naturally occurring Cas9 molecule, e.g., an S. thermophilus Cas9 molecule.

[0888] In an embodiment, the altered Cas9 molecule or Cas9 polypeptide is an eaCas9 molecule or eaCas9 polypeptide comprising the fixed amino acid residues of S. mutans shown in the consensus sequence disclosed in FIGS. 2A-2G, and has one or more amino acids that differ from the amino acid sequence of S. mutans (e.g., has a substitution) at one or more residue (e.g., 2, 3, 5, 10, 15, 20, 30, 50, 70, 80, 90, 100, 200 amino acid residues) represented by an “-” in the consensus sequence disclosed in FIGS. 2A-2G.

[0889] In an embodiment, the altered Cas9 molecule or Cas9 polypeptide comprises a sequence in which:

[0890] the sequence corresponding to the fixed sequence of the consensus sequence disclosed in FIGS. 2A-2G differs at no more than 1, 2, 3, 4, 5, 10, 15, or 20% of the fixed residues in the consensus sequence disclosed in FIGS. 2A-2G;

[0891] the sequence corresponding to the residues identified by “*” in the consensus sequence disclosed in FIGS. 2A-2G differ at no more than 1, 2, 3, 4, 5, 10, 15, 20, 25, 30, 35, or 40% of the “*” residues from the corresponding sequence of naturally occurring Cas9 molecule, e.g., an S. mutans Cas9 molecule; and,

[0892] the sequence corresponding to the residues identified by “-” in the consensus sequence disclosed in FIGS. 2A-2G differ at no more than 5, 10, 15, 20, 25, 30, 35, 40, 45, 55, or 60% of the “-” residues from the corresponding sequence of naturally occurring Cas9 molecule, e.g., an S. mutans Cas9 molecule.

[0893] In an embodiment, the altered Cas9 molecule or Cas9 polypeptide is an eaCas9 molecule or eaCas9 polypeptide comprising the fixed amino acid residues of L. innocula shown in the consensus sequence disclosed in FIGS. 2A-2G, and has one or more amino acids that differ from the amino acid sequence of L. innocula (e.g., has a substitution) at one or more residue (e.g., 2, 3, 5, 10, 15, 20, 30, 50, 70, 80, 90, 100, 200 amino acid residues) represented by an “-”in the consensus sequence disclosed in FIGS. 2A-2G.

[0894] In an embodiment, the altered Cas9 molecule or Cas9 polypeptide comprises a sequence in which:

[0895] the sequence corresponding to the fixed sequence of the consensus sequence disclosed in FIGS. 2A-2G differs at no more than 1, 2, 3, 4, 5, 10, 15, or 20% of the fixed residues in the consensus sequence disclosed in FIGS. 2A-2G;

[0896] the sequence corresponding to the residues identified by “*” in the consensus sequence disclosed in FIGS. 2A-2G differ at no more than 1, 2, 3, 4, 5, 10, 15, 20, 25, 30, 35, or 40% of the “*” residues from the corresponding sequence of naturally occurring Cas9 molecule, e.g., an L. innocula Cas9 molecule; and,

[0897] the sequence corresponding to the residues identified by “-” in the consensus sequence disclosed in FIGS. 2A-2G differ at no more than 5, 10, 15, 20, 25, 30, 35, 40, 45, 55, or 60% of the “-” residues from the corresponding sequence of naturally occurring Cas9 molecule, e.g., an L. innocula Cas9 molecule.

[0898] In an embodiment, the altered Cas9 molecule or Cas9 polypeptide, e.g., an eaCas9 molecule, can be a fusion, e.g., of two of more different Cas9 molecules or Cas9 polypeptides, e.g., of two or more naturally occurring Cas9 molecules of different species. For example, a fragment of a naturally occurring Cas9 molecule of one species can be fused to a fragment of a Cas9 molecule of a second species. As an example, a fragment of Cas9 molecule of S. pyogenes comprising an N-terminal RuvC-like domain can be fused to a fragment of Cas9 molecule of a species other than S. pyogenes (e.g., S. thermophilus) comprising an HNH-like domain.

[0899] Cas9 Molecules with Altered PAM Recognition or no PAM Recognition

[0900] Naturally occurring Cas9 molecules can recognize specific PAM sequences, for example the PAM recognition sequences described above for, e.g., S. pyogenes, S. thermophilus, S. mutans, S. aureus and N. meningitidis.

[0901] In an embodiment, a Cas9 molecule or Cas9 polypeptide has the same PAM specificities as a naturally occurring Cas9 molecule. In other embodiments, a Cas9 molecule or Cas9 polypeptide has a PAM specificity not associated with a naturally occurring Cas9 molecule, or a PAM specificity not associated with the naturally occurring Cas9 molecule to which it has the closest sequence homology. For example, a naturally occurring Cas9 molecule can be altered, e.g., to alter PAM recognition, e.g., to alter the PAM sequence that the Cas9 molecule or Cas9 polypeptide recognizes to decrease off target sites and/or improve specificity; or eliminate a PAM recognition requirement. In an embodiment, a Cas9 molecule can be altered, e.g., to increase length of PAM recognition sequence and/or improve Cas9 specificity to high level of identity, e.g., to decrease off target sites and increase specificity. In an embodiment, the length of the PAM recognition sequence is at least 4, 5, 6, 7, 8, 9, 10 or 15 amino acids in length.

[0902] Cas9 molecules or Cas9 polypeptides that recognize different PAM sequences and/or have reduced off-target activity can be generated using directed evolution. Exemplary methods and systems that can be used for directed evolution of Cas9 molecules are described, e.g., in Esvelt et al. Nature 2011, 472(7344): 499-503. Candidate Cas9 molecules can be evaluated, e.g., by methods described in Section IV.

[0903] Alterations of the PI domain, which mediates PAM recognition, are discussed below.

[0904] Synthetic Cas9 Molecules and Cas9 Polypeptides with Altered PI Domains

[0905] Current genome-editing methods are limited in the diversity of target sequences that can be targeted by the PAM sequence that is recognized by the Cas9 molecule utilized. A synthetic Cas9 molecule (or Syn-Cas9 molecule), or synthetic Cas9 polypeptide (or Syn-Cas9 polypeptide), as that term is used herein, refers to a Cas9 molecule or Cas9 polypeptide that comprises a Cas9 core domain from one bacterial species and a functional altered PI domain, i.e., a PI domain other than that naturally associated with the Cas9 core domain, e.g., from a different bacterial species.

[0906] In an embodiment, the altered PI domain recognizes a PAM sequence that is different from the PAM sequence recognized by the naturally-occurring Cas9 from which the Cas9 core domain is derived. In an embodiment, the altered PI domain recognizes the same PAM sequence recognized by the naturally-occurring Cas9 from which the Cas9 core domain is derived, but with different affinity or specificity. A Syn-Cas9 molecule or Syn-Cas9 polypeptide can be, respectively, a Syn-eaCas9 molecule or Syn-eaCas9 polypeptide or a Syn-eiCas9 molecule Syn-eiCas9 polypeptide.

[0907] An exemplary Syn-Cas9 molecule or Syn-Cas9 polypeptide comprises:

[0908] a) a Cas9 core domain, e.g., a Cas9 core domain from Table 100 or 200, e.g., a S. aureus, S. pyogenes, or C. jejuni Cas9 core domain; and

[0909] b) an altered PI domain from a species X Cas9 sequence selected from Tables 400 and 500.

[0910] In an embodiment, the RKR motif (the PAM binding motif) of said altered PI domain comprises: differences at 1, 2, or 3 amino acid residues; a difference in amino acid sequence at the first, second, or third position; differences in amino acid sequence at the first and second positions, the first and third positions, or the second and third positions; as compared with the sequence of the RKR motif of the native or endogenous PI domain associated with the Cas9 core domain.

[0911] In an embodiment, the Cas9 core domain comprises the Cas9 core domain from a species X Cas9 from Table 100 and said altered PI domain comprises a PI domain from a species Y Cas9 from Table 100.

[0912] In an embodiment, the RKR motif of the species X Cas9 is other than the RKR motif of the species Y Cas9.

[0913] In an embodiment, the RKR motif of the altered PI domain is selected from XXY, XNG, and XNQ.

[0914] In an embodiment, the altered PI domain has at least 60, 70, 80, 90, 95, or 100% homology with the amino acid sequence of a naturally occurring PI domain of said species Y from Table 100.

[0915] In an embodiment, the altered PI domain differs by no more than 50, 40, 30, 25, 20, 15, 10, 5, 4, 3, 2, or 1 amino acid residue from the amino acid sequence of a naturally occurring PI domain of said second species from Table 100.

[0916] In an embodiment, the Cas9 core domain comprises a S. aureus core domain and altered PI domain comprises: an A. denitrificans PI domain; a C. jejuni PI domain; a H. mustelae PI domain; or an altered PI domain of species X PI domain, wherein species X is selected from Table 500.

[0917] In an embodiment, the Cas9 core domain comprises a S. pyogenes core domain and the altered PI domain comprises: an A. denitrificans PI domain; a C. jejuni PI domain; a H. mustelae PI domain; or an altered PI domain of species X PI domain, wherein species X is selected from Table 500.

[0918] In an embodiment, the Cas9 core domain comprises a C. jejuni core domain and the altered PI domain comprises: an A. denitrificans PI domain; a H. mustelae PI domain; or an altered PI domain of species X PI domain, wherein species X is selected from Table 500.

[0919] In an embodiment, the Cas9 molecule or Cas9 polypeptide further comprises a linker disposed between said Cas9 core domain and said altered PI domain.

[0920] In an embodiment, the linker comprises: a linker described elsewhere herein disposed between the Cas9 core domain and the heterologous PI domain. Suitable linkers are further described in Section V.

[0921] Exemplary altered PI domains for use in Syn-Cas9 molecules are described in Tables 400 and 500. The sequences for the 83 Cas9 orthologs referenced in Tables 400 and 500 are provided in Table 100. Table 300 provides the Cas9 orthologs with known PAM sequences and the corresponding RKR motif.

[0922] In an embodiment, a Syn-Cas9 molecule or Syn-Cas9 polypeptide may also be size-optimized, e.g., the Syn-Cas9 molecule or Syn-Cas9 polypeptide comprises one or more deletions, and optionally one or more linkers disposed between the amino acid residues flanking the deletions. In an embodiment, a Syn-Cas9 molecule or Syn-Cas9 polypeptide comprises a REC deletion.

[0923] Size-Optimized Cas9 Molecules and Cas9 Polypeptides

[0924] Engineered Cas9 molecules and engineered Cas9 polypeptides described herein include a Cas9 molecule or Cas9 polypeptide comprising a deletion that reduces the size of the molecule while still retaining desired Cas9 properties, e.g., essentially native conformation, Cas9 nuclease activity, and/or target nucleic acid molecule recognition. Provided herein are Cas9 molecules or Cas9 polypeptides comprising one or more deletions and optionally one or more linkers, wherein a linker is disposed between the amino acid residues that flank the deletion. Methods for identifying suitable deletions in a reference Cas9 molecule, methods for generating Cas9 molecules with a deletion and a linker, and methods for using such Cas9 molecules will be apparent to one of ordinary skill in the art upon review of this document.

[0925] A Cas9 molecule, e.g., a S. aureus, S. pyogenes, or C. jejuni, Cas9 molecule, having a deletion is smaller, e.g., has reduced number of amino acids, than the corresponding naturally-occurring Cas9 molecule. The smaller size of the Cas9 molecules allows increased flexibility for delivery methods, and thereby increases utility for genome-editing. A Cas9 molecule or Cas9 polypeptide can comprise one or more deletions that do not substantially affect or decrease the activity of the resultant Cas9 molecules or Cas9 polypeptides described herein. Activities that are retained in the Cas9 molecules or Cas9 polypeptides comprising a deletion as described herein include one or more of the following:

[0926] a nickase activity, i.e., the ability to cleave a single strand, e.g., the non-complementary strand or the complementary strand, of a nucleic acid molecule; a double stranded nuclease activity, i.e., the ability to cleave both strands of a double stranded nucleic acid and create a double stranded break, which in an embodiment is the presence of two nickase activities;

[0927] an endonuclease activity;

[0928] an exonuclease activity;

[0929] a helicase activity, i.e., the ability to unwind the helical structure of a double stranded nucleic acid;

[0930] and recognition activity of a nucleic acid molecule, e.g., a target nucleic acid or a gRNA.

[0931] Activity of the Cas9 molecules or Cas9 polypeptides described herein can be assessed using the activity assays described herein or in the art.

[0932] Identifying Regions Suitable for Deletion

[0933] Suitable regions of Cas9 molecules for deletion can be identified by a variety of methods. Naturally-occurring orthologous Cas9 molecules from various bacterial species, e.g., any one of those listed in Table 100, can be modeled onto the crystal structure of S. pyogenes Cas9 (Nishimasu et al., Cell, 156:935-949, 2014) to examine the level of conservation across the selected Cas9 orthologs with respect to the three-dimensional conformation of the protein. Less conserved or unconserved regions that are spatially located distant from regions involved in Cas9 activity, e.g., interface with the target nucleic acid molecule and/or gRNA, represent regions or domains are candidates for deletion without substantially affecting or decreasing Cas9 activity.

[0934] REC-Optimized Cas9 Molecules and Cas9 Polypeptides

[0935] A REC-optimized Cas9 molecule, or a REC-optimized Cas9 polypeptide, as that term is used herein, refers to a Cas9 molecule or Cas9 polypeptide that comprises a deletion in one or both of the REC2 domain and the RE1_{CT} domain (collectively a REC deletion), wherein the deletion comprises at least 10% of the amino acid residues in the cognate domain. A REC-optimized Cas9 molecule or Cas9 polypeptide can be an eaCas9 molecule or eaCas9 polypeptide, or an eiCas9 molecule or eiCas9 polypeptide. An exemplary REC-optimized Cas9 molecule or REC-optimized Cas9 polypeptide comprises:

[0936] a) a deletion selected from:
[0937] i) a REC2 deletion;
[0938] ii) a REC1_{CT} deletion; or
[0939] iii) a REC1_{SUB} deletion.

[0940] Optionally, a linker is disposed between the amino acid residues that flank the deletion. In an embodiment a Cas9 molecule or Cas9 polypeptide includes only one deletion, or only two deletions. A Cas9 molecule or Cas9 polypeptide can comprise a REC2 deletion and a REC1_{CT} deletion. A Cas9 molecule or Cas9 polypeptide can comprise a REC2 deletion and a REC1_{SUB} deletion.

[0941] Generally, the deletion will contain at least 10% of the amino acids in the cognate domain, e.g., a REC2 deletion will include at least 10% of the amino acids in the REC2 domain. A deletion can comprise: at least 10, 20, 30, 40, 50, 60, 70, 80, or 90% of the amino acid residues of its cognate domain; all of the amino acid residues of its cognate domain; an amino acid residue outside its cognate domain; a plurality of amino acid residues outside its cognate domain; the amino acid residue immediately N terminal to its cognate domain; the amino acid residue immediately C terminal to its cognate domain; the amino acid residue immediately N terminal to its cognate and the amino acid residue immediately C terminal to its cognate domain; a plurality of, e.g., up to 5, 10, 15, or 20, amino acid residues N terminal to its cognate domain; a plurality of, e.g., up to 5, 10, 15, or 20, amino acid residues C terminal to its cognate domain; a plurality of, e.g., up to 5, 10, 15, or 20, amino acid residues N terminal to to its cognate domain and a plurality of e.g., up to 5, 10, 15, or 20, amino acid residues C terminal to its cognate domain.

[0942] In an embodiment, a deletion does not extend beyond: its cognate domain; the N terminal amino acid residue of its cognate domain; the C terminal amino acid residue of its cognate domain.

[0943] A REC-optimized Cas9 molecule or REC-optimized Cas9 polypeptide can include a linker disposed between the amino acid residues that flank the deletion. Suitable linkers for use between the amino acid resides that flank a REC deletion in a REC-optimized Cas9 molecule is disclosed in Section V.

[0944] In an embodiment, a REC-optimized Cas9 molecule or REC-optimized Cas9 polypeptide comprises an amino acid sequence that, other than any REC deletion and associated linker, has at least 50, 55, 60, 65, 70, 75, 80, 85, 90, 95, 99, or 100% homology with the amino acid sequence of a naturally occurring Cas 9, e.g., a Cas9 molecule described in Table 100, e.g., a S. aureus Cas9 molecule, a S. pyogenes Cas9 molecule, or a C. jejuni Cas9 molecule.

[0945] In an embodiment, a a REC-optimized Cas9 molecule or REC-optimized Cas9 polypeptide comprises an amino acid sequence that, other than any REC deletion and associated linker, differs by no more than 1, 2, 3, 4, 5, 6, 7, 8, 9, 10, 15, 20, or 25, amino acid residues from the amino acid sequence of a naturally occurring Cas 9, e.g., a Cas9 molecule described in Table 100, e.g., a S. aureus Cas9 molecule, a S. pyogenes Cas9 molecule, or a C. jejuni Cas9 molecule.

[0946] In an embodiment, a REC-optimized Cas9 molecule or REC-optimized Cas9 polypeptide comprises an amino acid sequence that, other than any REC deletion and associate linker, differs by no more than 1, 2, 3, 4, 5, 6, 7, 8, 9, 10, 15, 20, or 25% of the, amino acid residues from the amino acid sequence of a naturally occurring Cas 9, e.g., a Cas9 molecule described in Table 100, e.g., a S. aureus Cas9 molecule, a S. pyogenes Cas9 molecule, or a C. jejuni Cas9 molecule.

[0947] For sequence comparison, typically one sequence acts as a reference sequence, to which test sequences are compared. When using a sequence comparison algorithm, test and reference sequences are entered into a computer, subsequence coordinates are designated, if necessary, and sequence algorithm program parameters are designated. Default program parameters can be used, or alternative parameters can be designated. The sequence comparison algorithm then calculates the percent sequence identities for the test sequences relative to the reference sequence, based on the program parameters. Methods of alignment of sequences for comparison are well known in the art. Optimal alignment of sequences for comparison can be conducted, e.g., by the local homology algorithm of Smith and Waterman, (1970) Adv. Appl. Math. 2:482c, by the homology alignment algorithm of Needleman and Wunsch, (1970) J. Mol. Biol. 48:443, by the search for similarity method of Pearson and Lipman, (1988) Proc. Nat'l. Acad. Sci. USA 85:2444, by computerized implementations of these algorithms (GAP, BESTFIT, FASTA, and TFASTA in the Wisconsin Genetics Software Package, Genetics Computer Group, 575 Science Dr., Madison, Wis.), or by manual alignment and visual inspection (see, e.g., Brent et al., (2003) Current Protocols in Molecular Biology).

[0948] Two examples of algorithms that are suitable for determining percent sequence identity and sequence similarity are the BLAST and BLAST 2.0 algorithms, which are described in Altschul et al., (1977) Nuc. Acids Res. 25:3389-3402; and Altschul et al., (1990) J. Mol. Biol. 215:403-410, respectively. Software for performing BLAST analyses is publicly available through the National Center for Biotechnology Information.

[0949] The percent identity between two amino acid sequences can also be determined using the algorithm of E. Meyers and W. Miller, (1988) Comput. Appl. Biosci. 4:11-17) which has been incorporated into the ALIGN program (version 2.0), using a PAM120 weight residue table, a gap length penalty of 12 and a gap penalty of 4. In addition, the percent identity between two amino acid sequences can be determined using the Needleman and Wunsch (1970) J. Mol. Biol. 48:444-453) algorithm which has been incorporated into the GAP program in the GCG software package (available at www.gcg.com), using either a Blossom 62 matrix or a PAM250 matrix, and a gap weight of 16, 14, 12, 10, 8, 6, or 4 and a length weight of 1, 2, 3, 4, 5, or 6.

[0950] Sequence information for exemplary REC deletions are provided for 83 naturally-occurring Cas9 orthologs in Table 100. The amino acid sequences of exemplary Cas9 molecules from different bacterial species are shown below.

TABLE 100
Amino Acid Sequence of Cas9 Orthologs

| | | REC2 | | | REC1_{CT} | | | REC1_{SUB} | | |
|---|---|---|---|---|---|---|---|---|---|---|
| | Amino | start | stop | # AA | start | stop | # AA | start | stop | # AA |
| Species/ | acid | (AA | (AA | deleted | (AA | (AA | deleted | (AA | (AA | deleted |
| Composite ID | sequence | pos) | pos) | (n) | pos) | pos) | (n) | pos) | pos) | (n) |
| Staphylococcus | SEQ ID | 126 | 166 | 41 | 296 | 352 | 57 | 296 | 352 | 57 |
| Aureus | NO: 304 | | | | | | | | | |
| tr\|J7RUA5\|J7RU | | | | | | | | | | |
| A5_STAAU | | | | | | | | | | |
| Streptococcus | SEQ ID | 176 | 314 | 139 | 511 | 592 | 82 | 511 | 592 | 82 |
| Pyogenes | NO: 305 | | | | | | | | | |
| sp\|Q99ZW2\|CAS | | | | | | | | | | |
| 9_STRP1 | | | | | | | | | | |
| Campylobacter | SEQ ID | 137 | 181 | 45 | 316 | 360 | 45 | 316 | 360 | 45 |
| jejuni NCTC | NO: 306 | | | | | | | | | |
| 11168 | | | | | | | | | | |
| gi\|218563121\|ref\| | | | | | | | | | | |
| YP_002344900.1 | | | | | | | | | | |
| Bacteroides | SEQ ID | 148 | 339 | 192 | 524 | 617 | 84 | 524 | 617 | 84 |
| fragilis NCTC | NO: 307 | | | | | | | | | |
| 9343 | | | | | | | | | | |
| gi\|60683389\|ref\| | | | | | | | | | | |
| YP_213533.1\| | | | | | | | | | | |
| Bifidobacterium | SEQ ID | 173 | 335 | 163 | 516 | 607 | 87 | 516 | 607 | 87 |
| bifidum S17 | NO: 308 | | | | | | | | | |
| gi\|310286728\|ref\| | | | | | | | | | | |
| YP_003937986. | | | | | | | | | | |
| Veillonella | SEQ ID | 185 | 339 | 155 | 574 | 663 | 79 | 574 | 663 | 79 |
| atypica | NO: 309 | | | | | | | | | |
| ACS-134-V-Col | | | | | | | | | | |
| 7a | | | | | | | | | | |
| gi\|303229466\|ref\| | | | | | | | | | | |
| ZP_07316256.1 | | | | | | | | | | |
| Lactobacillus | SEQ ID | 169 | 320 | 152 | 559 | 645 | 78 | 559 | 645 | 78 |
| rhamnosus GG | NO: 310 | | | | | | | | | |
| gi\|258509199\|ref\| | | | | | | | | | | |
| YP_003171950.1 | | | | | | | | | | |
| Filifactor alocis | SEQ ID | 166 | 314 | 149 | 508 | 592 | 76 | 508 | 592 | 76 |
| ATCC 35896 | NO: 311 | | | | | | | | | |
| gi\|374307738\|ref\| | | | | | | | | | | |
| YP_005054169.1 | | | | | | | | | | |
| Oenococcus | SEQ ID | 169 | 317 | 149 | 555 | 639 | 80 | 555 | 639 | 80 |
| kitaharae DSM | NO: 312 | | | | | | | | | |
| 17330 | | | | | | | | | | |
| gi\|366983953\|gb\| | | | | | | | | | | |
| EHN59352.1\| | | | | | | | | | | |
| Fructobacillus | SEQ ID | 168 | 314 | 147 | 488 | 571 | 76 | 488 | 571 | 76 |
| fructosus KCTC | NO: 313 | | | | | | | | | |
| 3544 | | | | | | | | | | |
| gi\|339625081\|ref\| | | | | | | | | | | |
| ZP_08660870.1 | | | | | | | | | | |
| Catenibacterium | SEQ ID | 173 | 318 | 146 | 511 | 594 | 78 | 511 | 594 | 78 |
| mitsuokai DSM | NO: 314 | | | | | | | | | |
| 15897 | | | | | | | | | | |
| gi\|224543312\|ref\| | | | | | | | | | | |
| ZP_03683851.1 | | | | | | | | | | |
| Finegoldia | SEQ ID | 168 | 313 | 146 | 452 | 534 | 77 | 452 | 534 | 77 |
| magna ATCC | NO: 315 | | | | | | | | | |
| 29328 | | | | | | | | | | |
| gi\|169823755\|ref\| | | | | | | | | | | |
| YP_001691366.1 | | | | | | | | | | |
| Coriobacterium | SEQ ID | 175 | 318 | 144 | 511 | 592 | 82 | 511 | 592 | 82 |
| glomeransPW2 | NO: 316 | | | | | | | | | |
| gi\|328956315\|ref\| | | | | | | | | | | |
| YP_004373648.1 | | | | | | | | | | |
| Eubacterium | SEQ ID | 169 | 310 | 142 | 552 | 633 | 76 | 552 | 633 | 76 |
| yurii ATCC | NO: 317 | | | | | | | | | |
| 43715 | | | | | | | | | | |
| gi\|306821691\|ref\| | | | | | | | | | | |
| ZP_07455288.1 | | | | | | | | | | |
| Peptoniphilus | SEQ ID | 171 | 311 | 141 | 535 | 615 | 76 | 535 | 615 | 76 |
| duerdenii ATCC | NO: 318 | | | | | | | | | |
| BAA-1640 | | | | | | | | | | |
| gi\|304438954\|ref\| | | | | | | | | | | |
| ZP_07398877.1 | | | | | | | | | | |
| Acidaminococcus | SEQ ID | 167 | 306 | 140 | 511 | 591 | 75 | 511 | 591 | 75 |
| sp. D21 | NO: 319 | | | | | | | | | |
| gi\|227824983\|ref\| | | | | | | | | | | |
| ZP_03989815.1 | | | | | | | | | | |
| Lactobacillus | SEQ ID | 171 | 310 | 140 | 542 | 621 | 85 | 542 | 621 | 85 |
| farciminis KCTC | NO: 320 | | | | | | | | | |
| 3681 | | | | | | | | | | |
| gi\|336394882\|ref\| | | | | | | | | | | |
| ZP_08576281.1 | | | | | | | | | | |
| Streptococcus | SEQ ID | 185 | 324 | 140 | 411 | 490 | 85 | 411 | 490 | 85 |
| sanguinis SK49 | NO: 321 | | | | | | | | | |
| gi\|422884106\|ref\| | | | | | | | | | | |
| ZP_16930555.1 | | | | | | | | | | |
| Coprococcus | SEQ ID | 172 | 310 | 139 | 556 | 634 | 76 | 556 | 634 | 76 |
| catus GD-7 | NO: 322 | | | | | | | | | |
| gi\|291520705\|em | | | | | | | | | | |
| b\|CBK78998.1\| | | | | | | | | | | |
| Streptococcus | SEQ ID | 176 | 314 | 139 | 392 | 470 | 84 | 392 | 470 | 84 |
| mutans UA159 | NO: 323 | | | | | | | | | |
| gi\|24379809\|ref\| | | | | | | | | | | |
| NP_721764.1\| | | | | | | | | | | |
| Streptococcus | SEQ ID | 176 | 314 | 139 | 523 | 600 | 82 | 523 | 600 | 82 |
| pyogenes M1 | NO: 324 | | | | | | | | | |
| GAS | | | | | | | | | | |
| gi\|13622193\|gb\| | | | | | | | | | | |
| AAK33936.1\| | | | | | | | | | | |
| Streptococcus | SEQ ID | 176 | 314 | 139 | 481 | 558 | 81 | 481 | 558 | 81 |
| thermophilus | NO: 325 | | | | | | | | | |
| LMD-9 | | | | | | | | | | |
| gi\|116628213\|ref\| | | | | | | | | | | |
| YP_820832.1\| | | | | | | | | | | |
| Fusobacterium | SEQ ID | 171 | 308 | 138 | 537 | 614 | 76 | 537 | 614 | 76 |
| nucleatum | NO: 326 | | | | | | | | | |
| ATCC49256 | | | | | | | | | | |
| gi\|34762592\|ref\| | | | | | | | | | | |
| ZP_00143587.1 | | | | | | | | | | |
| Planococcus | SEQ ID | 162 | 299 | 138 | 538 | 614 | 94 | 538 | 614 | 94 |
| antarcticus DSM | NO: 327 | | | | | | | | | |
| 14505 | | | | | | | | | | |
| gi\|389815359\|ref\| | | | | | | | | | | |
| ZP_10206685.1 | | | | | | | | | | |
| Treponema | SEQ ID | 169 | 305 | 137 | 524 | 600 | 81 | 524 | 600 | 81 |
| denticola ATCC | NO: 328 | | | | | | | | | |
| 35405 | | | | | | | | | | |
| gi\|42525843\|ref\| | | | | | | | | | | |
| NP_970941.1\| | | | | | | | | | | |
| Solobacterium | SEQ ID | 179 | 314 | 136 | 544 | 619 | 77 | 544 | 619 | 77 |
| moorei F0204 | NO: 329 | | | | | | | | | |
| gi\|320528778\|ref\| | | | | | | | | | | |
| ZP_08029929.1 | | | | | | | | | | |
| Staphylococcus | SEQ ID | 164 | 299 | 136 | 531 | 606 | 92 | 531 | 606 | 92 |
| pseudintermedius | NO: 330 | | | | | | | | | |
| ED99 | | | | | | | | | | |
| gi\|323463801\|gb\| | | | | | | | | | | |
| ADX75954.1\| | | | | | | | | | | |
| Flavobacterium | SEQ ID | 162 | 286 | 125 | 538 | 613 | 63 | 538 | 613 | 63 |
| branchiophilum | NO: 331 | | | | | | | | | |
| FL-15 | | | | | | | | | | |
| gi\|347536497\|ref\| | | | | | | | | | | |
| YP_004843922.1 | | | | | | | | | | |
| Ignavibacterium | SEQ ID | 223 | 329 | 107 | 357 | 432 | 90 | 357 | 432 | 90 |
| album JCM | NO: 332 | | | | | | | | | |
| 16511 | | | | | | | | | | |
| gi\|385811609\|ref\| | | | | | | | | | | |
| YP_005848005.1 | | | | | | | | | | |
| Bergeyella | SEQ ID | 165 | 261 | 97 | 529 | 604 | 56 | 529 | 604 | 56 |
| zoohelcum | NO: 333 | | | | | | | | | |
| ATCC 43767 | | | | | | | | | | |
| gi\|423317190\|ref\| | | | | | | | | | | |
| ZP_17295095.1 | | | | | | | | | | |
| Nitrobacter | SEQ ID | 169 | 253 | 85 | 536 | 611 | 48 | 536 | 611 | 48 |
| hamburgensis | NO: 334 | | | | | | | | | |
| X14 | | | | | | | | | | |
| gi\|92109262\|ref\| | | | | | | | | | | |
| YP_571550.1 | | | | | | | | | | |
| Odoribacter | SEQ ID | 164 | 242 | 79 | 535 | 610 | 63 | 535 | 610 | 63 |
| laneus YIT | NO: 335 | | | | | | | | | |
| 12061 | | | | | | | | | | |
| gi\|374384763\|ref\| | | | | | | | | | | |
| ZP_09642280.1 | | | | | | | | | | |
| Legionella | SEQ ID | 164 | 239 | 76 | 402 | 476 | 67 | 402 | 476 | 67 |
| pneumophila str. | NO: 336 | | | | | | | | | |
| Paris | | | | | | | | | | |
| gi\|54296138\|ref\| | | | | | | | | | | |
| YP_122507.1\| | | | | | | | | | | |
| Bacteroides sp. | SEQ ID | 198 | 269 | 72 | 530 | 604 | 83 | 530 | 604 | 83 |
| 20 3 | NO: 337 | | | | | | | | | |
| gi\|301311869\|ref\| | | | | | | | | | | |
| ZP_07217791.1 | | | | | | | | | | |
| Akkermansia | SEQ ID | 136 | 202 | 67 | 348 | 418 | 62 | 348 | 418 | 62 |
| muciniphila | NO: 338 | | | | | | | | | |
| ATCC BAA-835 | | | | | | | | | | |
| gi\|187736489\|ref\| | | | | | | | | | | |
| YP_001878601. | | | | | | | | | | |
| Prevotella sp. | SEQ ID | 184 | 250 | 67 | 357 | 425 | 78 | 357 | 425 | 78 |
| C561 | NO: 339 | | | | | | | | | |
| gi\|345885718\|ref\| | | | | | | | | | | |
| ZP_08837074.1 | | | | | | | | | | |
| Wolinella | SEQ ID | 157 | 218 | 36 | 401 | 468 | 60 | 401 | 468 | 60 |
| succinogenes | NO: 340 | | | | | | | | | |
| DSM 1740 | | | | | | | | | | |
| gi\|34557932\|ref\| | | | | | | | | | | |
| NP_907747.1\| | | | | | | | | | | |
| Alicyclobacillus | SEQ ID | 142 | 196 | 55 | 416 | 482 | 61 | 416 | 482 | 61 |
| hesperidum | NO: 341 | | | | | | | | | |
| URH17-3-68 | | | | | | | | | | |
| gi\|403744858\|ref\| | | | | | | | | | | |
| ZP_10953934.1 | | | | | | | | | | |
| Caenispirillum | SEQ ID | 161 | 214 | 54 | 330 | 393 | 68 | 330 | 393 | 68 |
| salinarum AK4 | NO: 342 | | | | | | | | | |
| gi\|427429481\|ref\| | | | | | | | | | | |
| ZP_18919511.1 | | | | | | | | | | |
| Eubacterium | SEQ ID | 133 | 185 | 53 | 322 | 384 | 60 | 322 | 384 | 60 |
| rectale ATCC | NO: 343 | | | | | | | | | |
| 33656 | | | | | | | | | | |
| gi\|238924075\|ref\| | | | | | | | | | | |
| YP_002937591.1 | | | | | | | | | | |
| Mycoplasma | SEQ ID | 187 | 239 | 53 | 319 | 381 | 80 | 319 | 381 | 80 |
| synoviae 53 | NO: 344 | | | | | | | | | |
| gi\|71894592\|ref\| | | | | | | | | | | |
| YP_278700.1 | | | | | | | | | | |
| Porphyromonas | SEQ ID | 150 | 202 | 53 | 309 | 371 | 60 | 309 | 371 | 60 |
| sp. oral taxon 279 | NO: 345 | | | | | | | | | |
| str. F0450 | | | | | | | | | | |
| gi\|402847315\|ref\| | | | | | | | | | | |
| ZP_10895610.1 | | | | | | | | | | |
| Streptococcus | SEQ ID | 127 | 178 | 139 | 424 | 486 | 81 | 424 | 486 | 81 |
| thermophilus | NO: 346 | | | | | | | | | |
| LMD-9 | | | | | | | | | | |
| gi\|116627542\|ref\| | | | | | | | | | | |
| YP_820161.1 | | | | | | | | | | |
| Roseburia | SEQ ID | 154 | 204 | 51 | 318 | 380 | 69 | 318 | 380 | 69 |
| inulinivorans | NO: 347 | | | | | | | | | |
| DSM 16841 | | | | | | | | | | |
| gi\|225377804\|ref\| | | | | | | | | | | |
| ZP_03755025.1 | | | | | | | | | | |
| Methylosinus | SEQ ID | 144 | 193 | 50 | 426 | 488 | 64 | 426 | 488 | 64 |
| trichosporium | NO: 348 | | | | | | | | | |
| OB3b | | | | | | | | | | |
| gi\|296446027\|ref\| | | | | | | | | | | |
| ZP_06887976.1 | | | | | | | | | | |
| Ruminococcus | SEQ ID | 139 | 187 | 49 | 351 | 412 | 55 | 351 | 412 | 55 |
| albus 8 | NO: 349 | | | | | | | | | |
| gi\|325677756\|ref\| | | | | | | | | | | |
| ZP_08157403.1 | | | | | | | | | | |
| Bifidobacterium | SEQ ID | 183 | 230 | 48 | 370 | 431 | 44 | 370 | 431 | 44 |
| longum DJO10A | NO: 350 | | | | | | | | | |
| gi\|189440764\|ref\| | | | | | | | | | | |
| YP_001955845. | | | | | | | | | | |
| Enterococcus | SEQ ID | 123 | 170 | 48 | 327 | 387 | 60 | 327 | 387 | 60 |
| faecalis TX0012 | NO: 351 | | | | | | | | | |
| gi\|315149830\|gb\| | | | | | | | | | | |
| EFT93846.1 | | | | | | | | | | |
| Mycoplasma | SEQ ID | 179 | 226 | 48 | 314 | 374 | 79 | 314 | 374 | 79 |
| mobile 163K | NO: 352 | | | | | | | | | |
| gi\|47458868\|ref\| | | | | | | | | | | |
| YP_015730.1\| | | | | | | | | | | |
| Actinomyces | SEQ ID | 147 | 193 | 47 | 358 | 418 | 40 | 358 | 418 | 40 |
| coleocanis DSM | NO: 353 | | | | | | | | | |
| 15436 | | | | | | | | | | |
| gi\|227494853\|ref\| | | | | | | | | | | |
| ZP_03925169.1 | | | | | | | | | | |
| Dinoroseobacter | SEQ ID | 138 | 184 | 47 | 338 | 398 | 48 | 338 | 398 | 48 |
| shibae DFL 12 | NO: 354 | | | | | | | | | |
| gi\|159042956\|ref\| | | | | | | | | | | |
| YP_001531750.1 | | | | | | | | | | |
| Actinomyces sp. | SEQ ID | 183 | 228 | 46 | 349 | 409 | 40 | 349 | 409 | 40 |
| oral taxon 180 | NO: 355 | | | | | | | | | |
| str. F0310 | | | | | | | | | | |
| gi\|315605738\|ref\| | | | | | | | | | | |
| ZP_07880770.1 | | | | | | | | | | |
| Alcanivorax sp. | SEQ ID | 139 | 183 | 45 | 344 | 404 | 61 | 344 | 404 | 61 |
| W11-5 | NO: 356 | | | | | | | | | |
| gi\|407803669\|ref\| | | | | | | | | | | |
| ZP_11150502.1 | | | | | | | | | | |
| Aminomonas | SEQ ID | 134 | 178 | 45 | 341 | 401 | 63 | 341 | 401 | 63 |
| paucivorans | NO: 357 | | | | | | | | | |
| DSM 12260 | | | | | | | | | | |
| gi\|312879015\|ref\| | | | | | | | | | | |
| ZP_07738815.1 | | | | | | | | | | |
| Mycoplasma | SEQ ID | 139 | 183 | 45 | 319 | 379 | 76 | 319 | 379 | 76 |
| canis PG 14 | NO: 358 | | | | | | | | | |
| gi\|384393286\|gb\| | | | | | | | | | | |
| EIE39736.1\| | | | | | | | | | | |
| Lactobacillus | SEQ ID | 141 | 184 | 44 | 328 | 387 | 61 | 328 | 387 | 61 |
| coryniformis | NO: 359 | | | | | | | | | |
| KCTC 3535 | | | | | | | | | | |
| gi\|336393381\|ref\| | | | | | | | | | | |
| ZP_08574780.1 | | | | | | | | | | |
| Elusimicrobium | SEQ ID | 177 | 219 | 43 | 322 | 381 | 47 | 322 | 381 | 47 |
| minutum Pei191 | NO: 360 | | | | | | | | | |
| gi\|187250660\|ref\| | | | | | | | | | | |
| YP_001875142.1 | | | | | | | | | | |
| Neisseria | SEQ ID | 147 | 189 | 43 | 360 | 419 | 61 | 360 | 419 | 61 |
| meningitidis | NO: 361 | | | | | | | | | |
| Z2491 | | | | | | | | | | |
| gi\|218767588\|ref\| | | | | | | | | | | |
| YP_002342100.1 | | | | | | | | | | |
| Pasteurella | SEQ ID | 139 | 181 | 43 | 319 | 378 | 61 | 319 | 378 | 61 |
| multocida str. | NO: 362 | | | | | | | | | |
| Pm70 | | | | | | | | | | |
| gi\|15602992\|ref\| | | | | | | | | | | |
| NP_246064.1 | | | | | | | | | | |
| Rhodovulum sp. | SEQ ID | 141 | 183 | 43 | 319 | 378 | 48 | 319 | 378 | 48 |
| PH10 | NO: 363 | | | | | | | | | |
| gi\|402849997\|ref\| | | | | | | | | | | |
| ZP_10898214.1 | | | | | | | | | | |
| Eubacterium | SEQ ID | 131 | 172 | 42 | 303 | 361 | 59 | 303 | 361 | 59 |
| dolichum DSM | NO: 364 | | | | | | | | | |
| 3991 | | | | | | | | | | |
| gi\|160915782\|ref\| | | | | | | | | | | |
| ZP_02077990.1 | | | | | | | | | | |
| Nitratifractor | SEQ ID | 143 | 184 | 42 | 347 | 404 | 61 | 347 | 404 | 61 |
| salsuginis DSM | NO: 365 | | | | | | | | | |
| 16511 | | | | | | | | | | |
| gi\|319957206\|ref\| | | | | | | | | | | |
| YP_004168469.1 | | | | | | | | | | |
| Rhodospirillum | SEQ ID | 139 | 180 | 42 | 314 | 371 | 55 | 314 | 371 | 55 |
| rubrum ATCC | NO: 366 | | | | | | | | | |
| 11170 | | | | | | | | | | |
| gi\|83591793\|ref\| | | | | | | | | | | |
| YP_425545.1 | | | | | | | | | | |
| Clostridium | SEQ ID | 137 | 176 | 40 | 320 | 376 | 61 | 320 | 376 | 61 |
| cellulolyticum | NO: 367 | | | | | | | | | |
| H10 | | | | | | | | | | |
| gi\|220930482\|ref\| | | | | | | | | | | |
| YP_002507391.1 | | | | | | | | | | |
| Helicobacter | SEQ ID | 148 | 187 | 40 | 298 | 354 | 48 | 298 | 354 | 48 |
| mustelae 12198 | NO: 368 | | | | | | | | | |
| gi\|291276265\|ref\| | | | | | | | | | | |
| YP_003516037.1 | | | | | | | | | | |
| Ilyobacter | SEQ ID | 134 | 173 | 40 | 462 | 517 | 63 | 462 | 517 | 63 |
| polytropus DSM | NO: 369 | | | | | | | | | |
| 2926 | | | | | | | | | | |
| gi\|310780384\|ref\| | | | | | | | | | | |
| YP_003968716.1 | | | | | | | | | | |
| Sphaerochaeta | SEQ ID | 163 | 202 | 40 | 335 | 389 | 45 | 335 | 389 | 45 |
| globus str. Buddy | NO: 370 | | | | | | | | | |
| gi\|325972003\|ref\| | | | | | | | | | | |
| YP_004248194.1 | | | | | | | | | | |
| Staphylococcus | SEQ ID | 128 | 167 | 40 | 337 | 391 | 57 | 337 | 391 | 57 |
| lugdunensis | NO: 371 | | | | | | | | | |
| M23590 | | | | | | | | | | |
| gi\|315659848\|ref\| | | | | | | | | | | |
| ZP_07912707.1 | | | | | | | | | | |
| Treponema sp. | SEQ ID | 144 | 183 | 40 | 328 | 382 | 63 | 328 | 382 | 63 |
| JC4 | NO: 372 | | | | | | | | | |
| gi\|384109266\|ref\| | | | | | | | | | | |
| ZP_10010146.1 | | | | | | | | | | |
| uncultured delta | SEQ ID | 154 | 193 | 40 | 313 | 365 | 55 | 313 | 365 | 55 |
| proteobacterium | NO: 373 | | | | | | | | | |
| HF0070 07E19 | | | | | | | | | | |
| gi\|297182908\|gb\| | | | | | | | | | | |
| ADI19058.1\| | | | | | | | | | | |
| Alicycliphilus | SEQ ID | 140 | 178 | 39 | 317 | 366 | 48 | 317 | 366 | 48 |
| denitrificans | NO: 374 | | | | | | | | | |
| K601 | | | | | | | | | | |
| gi\|330822845\|ref\| | | | | | | | | | | |
| YP_004386148.1 | | | | | | | | | | |
| Azospirillum sp. | SEQ ID | 205 | 243 | 39 | 342 | 389 | 46 | 342 | 389 | 46 |
| B510 | NO: 375 | | | | | | | | | |
| gi\|288957741\|ref\| | | | | | | | | | | |
| YP_003448082.1 | | | | | | | | | | |
| Bradyrhizobium | SEQ ID | 143 | 181 | 39 | 323 | 370 | 48 | 323 | 370 | 48 |
| sp. BTAi1 | NO: 376 | | | | | | | | | |
| gi\|148255343\|ref\| | | | | | | | | | | |
| YP_001239928.1 | | | | | | | | | | |
| Parvibaculum | SEQ ID | 138 | 176 | 39 | 327 | 374 | 58 | 327 | 374 | 58 |
| lavamentivorans | NO: 377 | | | | | | | | | |
| DS-1 | | | | | | | | | | |
| gi\|154250555\|ref\| | | | | | | | | | | |
| YP_001411379.1 | | | | | | | | | | |
| Prevotella | SEQ ID | 170 | 208 | 39 | 328 | 375 | 61 | 328 | 375 | 61 |
| timonensis CRIS | NO: 378 | | | | | | | | | |
| 5C-B1 | | | | | | | | | | |
| gi\|282880052\|ref\| | | | | | | | | | | |
| ZP_06288774.1 | | | | | | | | | | |
| Bacillus smithii 7 | SEQ ID | 134 | 171 | 38 | 401 | 448 | 63 | 401 | 448 | 63 |
| 3 47FAA | NO: 379 | | | | | | | | | |
| gi\|365156657\|ref\| | | | | | | | | | | |
| ZP_09352959.1 | | | | | | | | | | |
| Cand. | SEQ ID | 135 | 172 | 38 | 344 | 391 | 53 | 344 | 391 | 53 |
| Puniceispirillum | NO: 380 | | | | | | | | | |
| marinum | | | | | | | | | | |
| IMCC1322 | | | | | | | | | | |
| gi\|294086111\|ref\| | | | | | | | | | | |
| YP_003552871.1 | | | | | | | | | | |
| Barnesiella | SEQ ID | 140 | 176 | 37 | 371 | 417 | 60 | 371 | 417 | 60 |
| intestinihominis | NO: 381 | | | | | | | | | |
| YIT 11860 | | | | | | | | | | |
| gi\|404487228\|ref\| | | | | | | | | | | |
| ZP_11022414.1 | | | | | | | | | | |
| Ralstonia syzygii | SEQ ID | 140 | 176 | 37 | 395 | 440 | 50 | 395 | 440 | 50 |
| R24 | NO: 382 | | | | | | | | | |
| gi\|344171927\|em | | | | | | | | | | |
| b\|CCA84553.1\| | | | | | | | | | | |
| Wolinella | SEQ ID | 145 | 180 | 36 | 348 | 392 | 60 | 348 | 392 | 60 |
| succinogenes | NO: 383 | | | | | | | | | |
| DSM 1740 | | | | | | | | | | |
| gi\|34557790\|ref\| | | | | | | | | | | |
| NP_907605.1\| | | | | | | | | | | |
| Mycoplasma | SEQ ID | 144 | 177 | 34 | 373 | 416 | 71 | 373 | 416 | 71 |
| gallisepticum str. | NO: 384 | | | | | | | | | |
| F | | | | | | | | | | |
| gi\|284931710\|gb\| | | | | | | | | | | |
| ADC31648.1 | | | | | | | | | | |
| Acidothermus | SEQ ID | 150 | 182 | 33 | 341 | 380 | 58 | 341 | 380 | 58 |
| cellulolyticus | NO: 385 | | | | | | | | | |
| 11B | | | | | | | | | | |
| gi\|117929158\|ref\| | | | | | | | | | | |
| YP_873709.1\| | | | | | | | | | | |
| Mycoplasma | SEQ ID | 156 | 184 | 29 | 381 | 420 | 62 | 381 | 420 | 62 |
| ovipneumoniae | NO: 386 | | | | | | | | | |
| SC01 | | | | | | | | | | |
| gi\|363542550\|ref\| | | | | | | | | | | |
| ZP_09312133.1 | | | | | | | | | | |

TABLE 200
Amino Acid Sequence of Cas9 Core Domains

| | |
|---|---|
| Cas9 Start | Cas9 Stop |
| (AA pos) | (AA pos) |

| | |
|---|---|
| | Start and Stop |
| | numbers refer to the |
| Strain Name | sequence in Table 100 |

| | | |
|---|---|---|
| Staphylococcus Aureus | 1 | 772 |
| Streptococcus Pyogenes | 1 | 1099 |
| Campulobacter Jejuni | 1 | 741 |

TABLE 300
Identified PAM sequences and
corresponding RKR motifs.

| | | RKR |
|---|---|---|
| | PAM | motif |
| Strain Name | sequence (NA) | (AA) |
| Streptococcus pyogenes | NGG | RKR |
| Streptococcus mutans | NGG | RKR |
| Streptococcus thermophilus A | NGGNG | RYR |
| Treponema denticola | NAAAAN | VAK |
| Streptococcus thermophilus B | NNAAAAW | IYK |
| Campylobacter jejuni | NNNNACA | NLK |
| Pasteurella multocida | GNNNCNNA | KDG |
| Neisseria meningitidis | NNNNGATT or | IGK |
| | NNNNGCTT | |
| Staphylococcus aureus | NNGRRV | NDK |
| | (R = A or G; | |
| | V = A, G or C) | |
| | or | |
| | NNGRRT | |
| | (R = A or G) | |

PI domains are provided in Tables 400 and 500.

TABLE 400
Altered PI Domains

| | PI Start | PI Stop | | |
|---|---|---|---|---|
| | (AA pos) | (AA pos) | | |
| | Start and Stop | | | |
| | numbers refer to the | | | |
| | sequences in Table | | Length of | RKR motif |
| Strain Name | 100 | | PI (AA) | (AA) |
| Alicycliphilus | 837 | 1029 | 193 | --Y |
| denitrificans K601 | | | | |
| Campylobacter jejuni | 741 | 984 | 244 | -NG |
| NCTC 11168 | | | | |
| Helicobacter | 771 | 1024 | 254 | -NQ |
| mustelae 12198 | | | | |

TABLE 500
Other Altered PI Domains

| | PI Start | PI Stop | | |
|---|---|---|---|---|
| | (AA pos) | (AA pos) | | |
| | Start and Stop | | | |
| | numbers refer to the | | | |
| | sequences in Table | | Length of | RKR motif |
| Strain Name | 100 | | PI (AA) | (AA) |
| Akkermansia muciniphila ATCC | 871 | 1101 | 231 | ALK |
| BAA-835 | | | | |
| Ralstonia syzygii R24 | 821 | 1062 | 242 | APY |
| Cand. Puniceispirillum marinum | 815 | 1035 | 221 | AYK |
| IMCC1322 | | | | |
| Fructobacillus fructosus KCTC 3544 | 1074 | 1323 | 250 | DGN |
| Eubacterium yurii ATCC 43715 | 1107 | 1391 | 285 | DGY |
| Eubacterium dolichum DSM 3991 | 779 | 1096 | 318 | DKK |
| Dinoroseobacter shibae DFL 12 | 851 | 1079 | 229 | DPI |
| Clostridium cellulolyticum H10 | 767 | 1021 | 255 | EGK |
| Pasteurella multocida str. Pm70 | 815 | 1056 | 242 | ENN |
| Mycoplasma canis PG 14 | 907 | 1233 | 327 | EPK |
| Porphyromonas sp. oral taxon 279 str. | 935 | 1197 | 263 | EPT |
| F0450 | | | | |
| Filifactor alocis ATCC 35896 | 1094 | 1365 | 272 | EVD |
| Aminomonas paucivorans DSM | 801 | 1052 | 252 | EVY |
| 12260 | | | | |
| Wolinella succinogenes DSM 1740 | 1034 | 1409 | 376 | EYK |
| Oenococcus kitaharae DSM 17330 | 1119 | 1389 | 271 | GAL |
| CoriobacteriumglomeransPW2 | 1126 | 1384 | 259 | GDR |
| Peptoniphilus duerdenii ATCC | 1091 | 1364 | 274 | GDS |
| BAA-1640 | | | | |
| Bifidobacterium bifidum S17 | 1138 | 1420 | 283 | GGL |
| Alicyclobacillus hesperidum | 876 | 1146 | 271 | GGR |
| URH17-3-68 | | | | |
| Roseburia inulinivorans DSM 16841 | 895 | 1152 | 258 | GGT |
| Actinomyces coleocanis DSM 15436 | 843 | 1105 | 263 | GKK |
| Odoribacter laneus YIT 12061 | 1103 | 1498 | 396 | GKV |
| Coprococcus catus GD-7 | 1063 | 1338 | 276 | GNQ |
| Enterococcus faecalis TX0012 | 829 | 1150 | 322 | GRK |
| Bacillus smithii 7 3 47FAA | 809 | 1088 | 280 | GSK |
| Legionella pneumophila str. Paris | 1021 | 1372 | 352 | GTM |
| Bacteroides fragilis NCTC 9343 | 1140 | 1436 | 297 | IPV |
| Mycoplasma ovipneumoniae SC01 | 923 | 1265 | 343 | IRI |
| Actinomyces sp. oral taxon 180 str. | 895 | 1181 | 287 | KEK |
| F0310 | | | | |
| Treponema sp. JC4 | 832 | 1062 | 231 | KIS |
| Fusobacteriumnucleatum | 1073 | 1374 | 302 | KKV |
| ATCC49256 | | | | |
| Lactobacillus farciminis KCTC 3681 | 1101 | 1356 | 256 | KKV |
| Nitratifractor salsuginis DSM 16511 | 840 | 1132 | 293 | KMR |
| Lactobacillus coryniformis KCTC | 850 | 1119 | 270 | KNK |
| 3535 | | | | |
| Mycoplasma mobile 163K | 916 | 1236 | 321 | KNY |
| Flavobacterium branchiophilum | 1182 | 1473 | 292 | KQK |
| FL-15 | | | | |
| Prevotella timonensis CRIS 5C-B1 | 957 | 1218 | 262 | KQQ |
| Methylosinus trichosporium OB3b | 830 | 1082 | 253 | KRP |
| Prevotella sp. C561 | 1099 | 1424 | 326 | KRY |
| Mycoplasma gallisepticum str. F | 911 | 1269 | 359 | KTA |
| Lactobacillus rhamnosus GG | 1077 | 1363 | 287 | KYG |
| Wolinella succinogenes DSM 1740 | 811 | 1059 | 249 | LPN |
| Streptococcus thermophilus LMD-9 | 1099 | 1388 | 290 | MLA |
| Treponema denticola ATCC 35405 | 1092 | 1395 | 304 | NDS |
| Bergeyella zoohelcum ATCC 43767 | 1098 | 1415 | 318 | NEK |
| Veillonella atypica | 1107 | 1398 | 292 | NGF |
| ACS-134-V-Col7a | | | | |
| Neisseria meningitidis Z2491 | 835 | 1082 | 248 | NHN |
| Ignavibacterium album JCM 16511 | 1296 | 1688 | 393 | NKK |
| Ruminococcus albus 8 | 853 | 1156 | 304 | NNF |
| Streptococcus thermophilus LMD-9 | 811 | 1121 | 311 | NNK |
| Barnesiella intestinihominis YIT | 871 | 1153 | 283 | NPV |
| 11860 | | | | |
| Azospirillum sp. B510 | 911 | 1168 | 258 | PFH |
| Rhodospirillum rubrum ATCC 11170 | 863 | 1173 | 311 | PRG |
| Planococcus antarcticus DSM 14505 | 1087 | 1333 | 247 | PYY |
| Staphylococcus pseudintermedius | 1073 | 1334 | 262 | QIV |
| ED99 | | | | |
| Alcanivorax sp. W11-5 | 843 | 1113 | 271 | RIE |
| Bradyrhizobium sp. BTAi1 | 811 | 1064 | 254 | RIY |
| Streptococcus pyogenes M1 GAS | 1099 | 1368 | 270 | RKR |
| Streptococcus mutans UA159 | 1078 | 1345 | 268 | RKR |
| Streptococcus Pyogenes | 1099 | 1368 | 270 | RKR |
| Bacteroides sp. 20 3 | 1147 | 1517 | 371 | RNI |
| S. aureus | 772 | 1053 | 282 | RNK |
| Solobacterium moorei F0204 | 1062 | 1327 | 266 | RSG |
| Finegoldia magna ATCC 29328 | 1081 | 1348 | 268 | RTE |
| uncultured delta proteobacterium | 770 | 1011 | 242 | SGG |
| HF0070 07E19 | | | | |
| Acidaminococcus sp. D21 | 1064 | 1358 | 295 | SIG |
| Eubacterium rectale ATCC 33656 | 824 | 1114 | 291 | SKK |
| Caenispirillum salinarum AK4 | 1048 | 1442 | 395 | SLV |
| Acidothermus cellulolyticus 11B | 830 | 1138 | 309 | SPS |
| Catenibacterium mitsuokai DSM | 1068 | 1329 | 262 | SPT |
| 15897 | | | | |
| Parvibaculum lavamentivorans DS-1 | 827 | 1037 | 211 | TGN |
| Staphylococcus lugdunensis M23590 | 772 | 1054 | 283 | TKK |
| Streptococcus sanguinis SK49 | 1123 | 1421 | 299 | TRM |
| Elusimicrobium minutum Pei191 | 910 | 1195 | 286 | TTG |
| Nitrobacter hamburgensis X14 | 914 | 1166 | 253 | VAY |
| Mycoplasma synoviae 53 | 991 | 1314 | 324 | VGF |
| Sphaerochaeta globus str. Buddy | 877 | 1179 | 303 | VKG |
| Ilyobacter polytropus DSM 2926 | 837 | 1092 | 256 | VNG |
| Rhodovulum sp. PH10 | 821 | 1059 | 239 | VPY |
| Bifidobacterium longum DJO10A | 904 | 1187 | 284 | VRK |

[0951] Nucleic Acids Encoding Cas9 Molecules

[0952] Nucleic acids encoding the Cas9 molecules or Cas9 polypeptides, e.g., an eaCas9 molecule or eaCas9 polypeptide, are provided herein.

[0953] Exemplary nucleic acids encoding Cas9 molecules or Cas9 polypeptides are described in Cong et al., Science 2013, 399(6121):819-823; Wang et al., Cell 2013, 153(4):910-918; Mali et al., Science 2013, 399(6121):823-826; Jinek et al., Science 2012, 337(6096):816-821. Another exemplary nucleic acid encoding a Cas9 molecule or Cas9 polypeptide is shown in black in FIG. 8.

[0954] In an embodiment, a nucleic acid encoding a Cas9 molecule or Cas9 polypeptide can be a synthetic nucleic acid sequence. For example, the synthetic nucleic acid molecule can be chemically modified, e.g., as described in Section VIII. In an embodiment, the Cas9 mRNA has one or more (e.g., all of the following properties: it is capped, polyadenylated, substituted with 5-methylcytidine and/or pseudouridine.

[0955] In addition, or alternatively, the synthetic nucleic acid sequence can be codon optimized, e.g., at least one non-common codon or less-common codon has been replaced by a common codon. For example, the synthetic nucleic acid can direct the synthesis of an optimized messenger mRNA, e.g., optimized for expression in a mammalian expression system, e.g., described herein. In addition, or alternatively, a nucleic acid encoding a Cas9 molecule or Cas9 polypeptide may comprise a nuclear localization sequence (NLS). Nuclear localization sequences are known in the art. An exemplary codon optimized nucleic acid sequence encoding a Cas9 molecule of S. pyogenes is provided as SEQ ID NO:22 with the corresponding amino acid sequence as SEQ ID NO:23. An exemplary codon optimized nucleic acid sequence encoding a Cas9 molecule of N. meningitidis is provided as SEQ ID NO:24 with the corresponding amino acid sequence as SEQ ID NO:25. Exemplary codon optimized nucleic acid sequences encoding a Cas9 molecule of S. aureus are provided as SEQ ID NO:39, SEQ ID NO:415, and SEQ ID NO:416 with the corresponding amino acid sequence as SEQ ID NO:26. An exemplary codon optimized nucleic acid sequence encoding a Cas9 molecule of S. aureus Cas9 nickase D10A is provided as SEQ ID NO:417. An exemplary codon optimized nucleic acid sequence encoding a Cas9 molecule of S. aureus Cas9 nickase N580A is provided as SEQ ID NO:418. If any of the above Cas9 sequences are fused with a peptide or polypeptide at the C-terminus, it is understood that the stop codon will be removed.

[0956] Other Cas Molecules and Cas Polypeptides

[0957] Various types of Cas molecules or Cas polypeptides can be used to practice the inventions disclosed herein. In some embodiments, Cas molecules of Type II Cas systems are used. In other embodiments, Cas molecules of other Cas systems are used. For example, Type I or Type III Cas molecules may be used. Exemplary Cas molecules (and Cas systems) are described, e.g., in Haft et al., PLoS Computational Biology 2005, 1(6): e60 and Makarova et al., Nature Review Microbiology 2011, 9:467-477, the contents of both references are incorporated herein by reference in their entirety. Exemplary Cas molecules (and Cas systems) are also shown in Table 600.

TABLE 600
Cas Systems

| | | | Structure of | | |
|---|---|---|---|---|---|
| | | | encoded | Families and | |
| | | Name | protein | superfamily | |
| Gene | System type or | from Haft | (PDB | of encoded | |
| name^{‡} | subtype | et al.^{§} | accessions)¶ | protein^{#}** | Representatives |
| cas1 | Type I | cas1 | 3GOD, | COG1518 | SERP2463, |
| | Type II | | 3LFX and | | SPy1047 and |
| | Type III | | 2YZS | | ygbT |
| cas2 | Type I | cas2 | 2IVY, 218E | COG1343 and | SERP2462, |
| | Type II | | and 3EXC | COG3512 | SPy1048, |
| | Type III | | | | SPy1723 |
| | | | | | (N-terminal |
| | | | | | domain) and ygbF |
| cas3′ | Type I^{‡‡} | cas3 | NA | COG1203 | APE1232 and |
| | | | | | ygcB |
| cas3″ | Subtype I-A | NA | NA | COG2254 | APE1231 and |
| | Subtype I-B | | | | BH0336 |
| cas4 | Subtype I-A | cas4 and | NA | COG1468 | APE1239 and |
| | Subtype I-B | csa1 | | | BH0340 |
| | Subtype I-C | | | | |
| | Subtype I-D | | | | |
| | Subtype II-B | | | | |
| cas5 | Subtype I-A | cas5a, | 3KG4 | COG1688 | APE1234, |
| | Subtype I-B | cas5d, | | (RAMP) | BH0337, devS and |
| | Subtype I-C | cas5e, | | | ygcI |
| | Subtype I-E | cas5h, | | | |
| | | cas5p, | | | |
| | | cas5t and | | | |
| | | cmx5 | | | |
| cas6 | Subtype I-A | cas6 and | 3I4H | COG1583 and | PF1131 and |
| | Subtype I-B | cmx6 | | COG5551 | slr7014 |
| | Subtype I-D | | | (RAMP) | |
| | Subtype III-A | | | | |
| | Subtype III-B | | | | |
| cas6e | Subtype I-E | cse3 | 1WJ9 | (RAMP) | ygcH |
| cas6f | Subtype I-F | csy4 | 2XLJ | (RAMP) | y1727 |
| cas7 | Subtype I-A | csa2, csd2, | NA | COG1857 and | devR and ygcJ |
| | Subtype I-B | cse4, csh2, | | COG3649 | |
| | Subtype I-C | csp1 and | | (RAMP) | |
| | Subtype I-E | cst2 | | | |
| cas8a1 | Subtype I-A^{‡‡} | cmx1, cst1, | NA | BH0338-like | LA3191^{§§} and |
| | | csx8, csx13 | | | PG2018^{§§} |
| | | and | | | |
| | | CXXC-CXXC | | | |
| cas8a2 | Subtype I-A^{‡‡} | csa4 and | NA | PH0918 | AF0070, AF1873, |
| | | csx9 | | | MJ0385, PF0637, |
| | | | | | PH0918 and |
| | | | | | SSO1401 |
| cas8b | Subtype I-B^{‡‡} | csh1 and | NA | BH0338-like | MTH1090 and |
| | | TM1802 | | | TM1802 |
| cas8c | Subtype I-C^{‡‡} | csd1 and | NA | BH0338-like | BH0338 |
| | | csp2 | | | |
| cas9 | Type II^{‡‡} | csn1 and | NA | COG3513 | FTN_0757 and |
| | | csx12 | | | SPy1046 |
| cas10 | Type III^{‡‡} | cmr2, | NA | COG1353 | MTH326, |
| | | csm1 and | | | Rv2823c^{§§} and |
| | | csx11 | | | TM1794^{§§} |
| cas10d | Subtype I-D^{‡‡} | csc3 | NA | COG1353 | slr7011 |
| csy1 | Subtype I-F^{‡‡} | csy1 | NA | y1724-like | y1724 |
| csy2 | Subtype I-F | csy2 | NA | (RAMP) | y1725 |
| csy3 | Subtype I-F | csy3 | NA | (RAMP) | y1726 |
| cse1 | Subtype I-E^{‡‡} | cse1 | NA | YgcL-like | ygcL |
| cse2 | Subtype I-E | cse2 | 2ZCA | YgcK-like | ygcK |
| csc1 | Subtype I-D | csc1 | NA | alr1563-like | alr1563 |
| | | | | (RAMP) | |
| csc2 | Subtype I-D | csc1 and | NA | COG1337 | slr7012 |
| | | csc2 | | (RAMP) | |
| csa5 | Subtype I-A | csa5 | NA | AF1870 | AF1870, MJ0380, |
| | | | | | PF0643 and |
| | | | | | SSO1398 |
| csn2 | Subtype II-A | csn2 | NA | SPy1049-like | SPy1049 |
| csm2 | Subtype III-A^{‡‡} | csm2 | NA | COG1421 | MTH1081 and |
| | | | | | SERP2460 |
| csm3 | Subtype III-A | csc2 and | NA | COG1337 | MTH1080 and |
| | | csm3 | | (RAMP) | SERP2459 |
| csm4 | Subtype III-A | csm4 | NA | COG1567 | MTH1079 and |
| | | | | (RAMP) | SERP2458 |
| csm5 | Subtype III-A | csm5 | NA | COG1332 | MTH1078 and |
| | | | | (RAMP) | SERP2457 |
| csm6 | Subtype III-A | APE2256 | 2WTE | COG1517 | APE2256 and |
| | | and csm6 | | | SSO1445 |
| cmr1 | Subtype III-B | cmr1 | NA | COG1367 | PF1130 |
| | | | | (RAMP) | |
| cmr3 | Subtype III-B | cmr3 | NA | COG1769 | PF1128 |
| | | | | (RAMP) | |
| cmr4 | Subtype III-B | cmr4 | NA | COG1336 | PF1126 |
| | | | | (RAMP) | |
| cmr5 | Subtype III-B^{‡‡} | cmr5 | 2ZOP and | COG3337 | MTH324 and |
| | | | 2OEB | | PF1125 |
| cmr6 | Subtype III-B | cmr6 | NA | COG1604 | PF1124 |
| | | | | (RAMP) | |
| csb1 | Subtype I-U | GSU0053 | NA | (RAMP) | Balac_1306 and |
| | | | | | GSU0053 |
| csb2 | Subtype I-U^{§§} | NA | NA | (RAMP) | Balac_1305 and |
| | | | | | GSU0054 |
| csb3 | Subtype I-U | NA | NA | (RAMP) | Balac_1303^{§§} |
| csx17 | Subtype I-U | NA | NA | NA | Btus_2683 |
| csx14 | Subtype I-U | NA | NA | NA | GSU0052 |
| csx10 | Subtype I-U | csx10 | NA | (RAMP) | Caur_2274 |
| csx16 | Subtype III-U | VVA1548 | NA | NA | VVA1548 |
| csaX | Subtype III-U | csaX | NA | NA | SSO1438 |
| csx3 | Subtype III-U | csx3 | NA | NA | AF1864 |
| csx1 | Subtype III-U | csa3, csx1, | 1XMX and | COG1517 and | MJ1666, NE0113, |
| | | csx2, | 2171 | COG4006 | PF1127 and |
| | | DXTHG, | | | TM1812 |
| | | NE0113 | | | |
| | | and | | | |
| | | TIGR02710 | | | |
| csx15 | Unknown | NA | NA | TTE2665 | TTE2665 |
| csf1 | Type U | csf1 | NA | NA | AFE_1038 |
| csf2 | Type U | csf2 | NA | (RAMP) | AFE_1039 |
| csf3 | Type U | csf3 | NA | (RAMP) | AFE_1040 |
| csf4 | Type U | csf4 | NA | NA | AFE_1037 |

### IV. Functional Analysis of Candidate Molecules

[0958] Candidate Cas9 molecules, candidate gRNA molecules, candidate Cas9 molecule/gRNA molecule complexes, can be evaluated by art-known methods or as described herein. For example, exemplary methods for evaluating the endonuclease activity of Cas9 molecule are described, e.g., in Jinek et al., SCIENCE 2012, 337(6096):816-821.

[0959] Binding and Cleavage Assay: Testing the Endonuclease Activity of Cas9 Molecule

[0960] The ability of a Cas9 molecule/gRNA molecule complex to bind to and cleave a target nucleic acid can be evaluated in a plasmid cleavage assay. In this assay, synthetic or in vitro-transcribed gRNA molecule is pre-annealed prior to the reaction by heating to 95° C. and slowly cooling down to room temperature. Native or restriction digest-linearized plasmid DNA (300 ng (˜8 nM)) is incubated for 60 min at 37° C. with purified Cas9 protein molecule (50-500 nM) and gRNA (50-500 nM, 1:1) in a Cas9 plasmid cleavage buffer (20 mM HEPES pH 7.5, 150 mM KCl, 0.5 mM DTT, 0.1 mM EDTA) with or without 10 mM MgCl₂. The reactions are stopped with 5X DNA loading buffer (30% glycerol, 1.2% SDS, 250 mM EDTA), resolved by a 0.8 or 1% agarose gel electrophoresis and visualized by ethidium bromide staining. The resulting cleavage products indicate whether the Cas9 molecule cleaves both DNA strands, or only one of the two strands. For example, linear DNA products indicate the cleavage of both DNA strands. Nicked open circular products indicate that only one of the two strands is cleaved.

[0961] Alternatively, the ability of a Cas9 molecule/gRNA molecule complex to bind to and cleave a target nucleic acid can be evaluated in an oligonucleotide DNA cleavage assay. In this assay, DNA oligonucleotides (10 pmol) are radiolabeled by incubating with 5 units T4 polynucleotide kinase and ˜3-6 pmol (˜20-40 mCi) [γ-32P]-ATP in 1× T4 polynucleotide kinase reaction buffer at 37° C. for 30 min, in a 50 μL reaction. After heat inactivation (65° C. for 20 min), reactions are purified through a column to remove unincorporated label. Duplex substrates (100 nM) are generated by annealing labeled oligonucleotides with equimolar amounts of unlabeled complementary oligonucleotide at 95° C. for 3 min, followed by slow cooling to room temperature. For cleavage assays, gRNA molecules are annealed by heating to 95° C. for 30 s, followed by slow cooling to room temperature. Cas9 (500 nM final concentration) is pre-incubated with the annealed gRNA molecules (500 nM) in cleavage assay buffer (20 mM HEPES pH 7.5, 100 mM KCl, 5 mM MgCl2, 1 mM DTT, 5% glycerol) in a total volume of 9 μl. Reactions are initiated by the addition of 1 μl target DNA (10 nM) and incubated for 1 h at 37° C. Reactions are quenched by the addition of 20 μl of loading dye (5 mM EDTA, 0.025% SDS, 5% glycerol in formamide) and heated to 95° C. for 5 min. Cleavage products are resolved on 12% denaturing polyacrylamide gels containing 7 M urea and visualized by phosphorimaging. The resulting cleavage products indicate that whether the complementary strand, the non-complementary strand, or both, are cleaved.

[0962] One or both of these assays can be used to evaluate the suitability of a candidate gRNA molecule or candidate Cas9 molecule.

[0963] Binding Assay: Testing the Binding of Cas9 Molecule to Target DNA

[0964] Exemplary methods for evaluating the binding of Cas9 molecule to target DNA are described, e.g., in Jinek et al., SCIENCE 2012; 337(6096):816-821.

[0965] For example, in an electrophoretic mobility shift assay, target DNA duplexes are formed by mixing of each strand (10 nmol) in deionized water, heating to 95° C. for 3 min and slow cooling to room temperature. All DNAs are purified on 8% native gels containing 1× TBE. DNA bands are visualized by UV shadowing, excised, and eluted by soaking gel pieces in DEPC-treated H₂O. Eluted DNA is ethanol precipitated and dissolved in DEPC-treated H₂O. DNA samples are 5′ end labeled with [γ-32P]-ATP using T4 polynucleotide kinase for 30 min at 37° C. Polynucleotide kinase is heat denatured at 65° C. for 20 min, and unincorporated radiolabel is removed using a column. Binding assays are performed in buffer containing 20 mM HEPES pH 7.5, 100 mM KCl, 5 mM MgCl₂, 1 mM DTT and 10% glycerol in a total volume of 10 μl. Cas9 protein molecule is programmed with equimolar amounts of pre-annealed gRNA molecule and titrated from 100 pM to 1 μM. Radiolabeled DNA is added to a final concentration of 20 pM. Samples are incubated for 1 h at 37° C. and resolved at 4° C. on an 8% native polyacrylamide gel containing 1× TBE and 5 mM MgCl₂. Gels are dried and DNA visualized by phosphorimaging.

[0966] Differential Scanning Flourimetry (DSF)

[0967] The thermostability of Cas9-gRNA ribonucleoprotein (RNP) complexes can be measured via DSF. This technique measures the thermostability of a protein, which can increase under favorable conditions such as the addition of a binding RNA molecule, e.g., a gRNA.

[0968] The assay is performed using two different protocols, one to test the best stoichiometric ratio of gRNA:Cas9 protein and another to determine the best solution conditions for RNP formation.

[0969] To determine the best solution to form RNP complexes, a 2 uM solution of Cas9 in water+10× SYPRO Orange® (Life Techonologies cat#S-6650) and dispensed into a 384 well plate. An equimolar amount of gRNA diluted in solutions with varied pH and salt is then added. After incubating at room temperature for 10′ and brief centrifugation to remove any bubbles,a Bio-Rad CFX384™ Real-Time System C1000 Touch™ Thermal Cycler with the Bio-Rad CFX Manager software is used to run a gradient from 20° C. to 90° C. with a 1° increase in temperature every 10 seconds.

[0970] The second assay consists of mixing various concentrations of gRNA with 2 uM Cas9 in optimal buffer from assay 1 above and incubating at RT for 10′ in a 384 well plate. An equal volume of optimal buffer +10× SYPRO Orange® (Life Techonologies cat #S-6650) is added and the plate sealed with Microseal® B adhesive (MSB-1001). Following brief centrifugation to remove any bubbles, a Bio-Rad CFX384™ Real-Time System C1000 Touch™ Thermal Cycler with the Bio-Rad CFX Manager software is used to run a gradient from 20° C. to 90° C. with a 1° increase in temperature every 10 seconds.

### V. Genome Editing Approaches

[0971] Described herein are methods for targeted knockout of one or both alleles of a gene using NHEJ (see Section V.1). In another embodiment, methods are provided for targeted knockdown of a gene (see Section V.2). It is further contemplated that the disclosed methods may target two or more genes for knockdown or knockout or a combination thereof.

[0972] Mutations in a target gene (e.g., the HBB gene) may be corrected using one of the approaches discussed herein. In an embodiment, a mutation is corrected by homology directed repair (HDR) using an exogenously provided template nucleic acid (see Section V.3). In another embodiment, a mutation is corrected by homology directed repair without using an exogenously provided template nucleic acid (see Section V.4).

[0973] In general, it is to be understood that the alteration of any gene according to the methods described herein can be mediated by any mechanism and that any methods are not limited to a particular mechanism. Exemplary mechanisms that can be associated with the alteration of a gene include, but are not limited to, non-homologous end joining (e.g., classical or alternative), microhomology-mediated end joining (MMEJ), homology-directed repair (e.g., endogenous donor template mediated), SDSA (synthesis dependent strand annealing), single strand annealing or single strand invasion-(e.g., see exemplary mechanisms in Section V.5 and Section V.6).

[0974] V.1 NHEJ Approaches for Gene Targeting

[0975] As described herein, nuclease-induced non-homologous end-joining (NHEJ) can be used to target gene-specific knockouts. Nuclease-induced NHEJ can also be used to remove (e.g., delete) sequence insertions in a genge.

[0976] While not wishing to be bound by theory, it is believed that, in an embodiment, the genomic alterations associated with the methods described herein rely on nuclease-induced NHEJ and the error-prone nature of the NHEJ repair pathway. NHEJ repairs a double-strand break in the DNA by joining together the two ends; however, generally, the original sequence is restored only if two compatible ends, exactly as they were formed by the double-strand break, are perfectly ligated. The DNA ends of the double-strand break are frequently the subject of enzymatic processing, resulting in the addition or removal of nucleotides, at one or both strands, prior to rejoining of the ends. This results in the presence of insertion and/or deletion (indel) mutations in the DNA sequence at the site of the NHEJ repair. Two-thirds of these mutations typically alter the reading frame and, therefore, produce a non-functional protein. Additionally, mutations that maintain the reading frame, but which insert or delete a significant amount of sequence, can destroy functionality of the protein. This is locus dependent as mutations in critical functional domains are likely less tolerable than mutations in non-critical regions of the protein.

[0977] The indel mutations generated by NHEJ are unpredictable in nature; however, at a given break site certain indel sequences are favored and are over represented in the population, likely due to small regions of microhomology. The lengths of deletions can vary widely; most commonly in the 1-50 bp range, but they can easily reach greater than 100-200 bp. Insertions tend to be shorter and often include short duplications of the sequence immediately surrounding the break site. However, it is possible to obtain large insertions, and in these cases, the inserted sequence has often been traced to other regions of the genome or to plasmid DNA present in the cells.

[0978] Because NHEJ is a mutagenic process, it can also be used to delete small sequence motifs as long as the generation of a specific final sequence is not required. If a double-strand break is targeted near to a short target sequence, the deletion mutations caused by the NHEJ repair often span, and therefore remove, the unwanted nucleotides. For the deletion of larger DNA segments, introducing two double-strand breaks, one on each side of the sequence, can result in NHEJ between the ends with removal of the entire intervening sequence. Both of these approaches can be used to delete specific DNA sequences; however, the error-prone nature of NHEJ may still produce indel mutations at the site of repair.

[0979] Both double strand cleaving eaCas9 molecules and single strand, or nickase, eaCas9 molecules can be used in the methods and compositions described herein to generate NHEJ-mediated indels. NHEJ-mediated indels targeted to the gene, e.g., a coding region, e.g., an early coding region of a gene can be used to knockout (i.e., eliminate expression of) a gene. For example, early coding region of a gene includes sequence immediately following a transcription start site, within a first exon of the coding sequence, or within 500 bp of the transcription start site (e.g., less than 500, 450, 400, 350, 300, 250, 200, 150, 100 or 50 bp).

[0980] Placement of Double Strand or Single Strand Breaks Relative to the Target Position

[0981] In an embodiment, in which a gRNA and Cas9 nuclease generate a double strand break for the purpose of inducing NHEJ-mediated indels, a gRNA, e.g., a unimolecular (or chimeric) or modular gRNA molecule, is configured to position one double-strand break in close proximity to a nucleotide of the target position. In an embodiment, the cleavage site is between 0-30 bp away from the target position (e.g., less than 30, 25, 20, 15, 10, 9, 8, 7, 6, 5, 4, 3, 2 or 1 bp from the target position).

[0982] In an embodiment, in which two gRNAs complexing with Cas9 nickases induce two single strand breaks for the purpose of inducing NHEJ-mediated indels, two gRNAs, e.g., independently, unimolecular (or chimeric) or modular gRNA, are configured to position two single-strand breaks to provide for NHEJ repair a nucleotide of the target position. In an embodiment, the gRNAs are configured to position cuts at the same position, or within a few nucleotides of one another, on different strands, essentially mimicking a double strand break. In an embodiment, the closer nick is between 0-30 bp away from the target position (e.g., less than 30, 25, 20, 15, 10, 9, 8, 7, 6, 5, 4, 3, 2 or 1 bp from the target position), and the two nicks are within 25-55 bp of each other (e.g., between 25 to 50, 25 to 45, 25 to 40, 25 to 35, 25 to 30, 50 to 55, 45 to 55, 40 to 55, 35 to 55, 30 to 55, 30 to 50, 35 to 50, 40 to 50, 45 to 50, 35 to 45, or 40 to 45 bp) and no more than 100 by away from each other (e.g., no more than 90, 80, 70, 60, 50, 40, 30, 20 or 10 bp). In an embodiment, the gRNAs are configured to place a single strand break on either side of a nucleotide of the target position.

[0983] Both double strand cleaving eaCas9 molecules and single strand, or nickase, eaCas9 molecules can be used in the methods and compositions described herein to generate breaks both sides of a target position. Double strand or paired single strand breaks may be generated on both sides of a target position to remove the nucleic acid sequence between the two cuts (e.g., the region between the two breaks in deleted). In an embodiment, two gRNAs, e.g., independently, unimolecular (or chimeric) or modular gRNA, are configured to position a double-strand break on both sides of a target position. In an alternate embodiment, three gRNAs, e.g., independently, unimolecular (or chimeric) or modular gRNA, are configured to position a double strand break (i.e., one gRNA complexes with a cas9 nuclease) and two single strand breaks or paired single stranded breaks (i.e., two gRNAs complex with Cas9 nickases) on either side of the target position. In another embodiment, four gRNAs, e.g., independently, unimolecular (or chimeric) or modular gRNA, are configured to generate two pairs of single stranded breaks (i.e., two pairs of two gRNAs complex with Cas9 nickases) on either side of the target position. The double strand break(s) or the closer of the two single strand nicks in a pair will ideally be within 0-500 bp of the target position (e.g., no more than 450, 400, 350, 300, 250, 200, 150, 100, 50 or 25 bp from the target position). When nickases are used, the two nicks in a pair are within 25-55 bp of each other (e.g., between 25 to 50, 25 to 45, 25 to 40, 25 to 35, 25 to 30, 50 to 55, 45 to 55, 40 to 55, 35 to 55, 30 to 55, 30 to 50, 35 to 50, 40 to 50, 45 to 50, 35 to 45, or 40 to 45 bp) and no more than 100 by away from each other (e.g., no more than 90, 80, 70, 60, 50, 40, 30, 20 or 10 bp).

[0984] V.2 Targeted Knockdown

[0985] Unlike CRISPR/Cas-mediated gene knockout, which permanently eliminates or reduces expression by mutating the gene at the DNA level, CRISPR/Cas knockdown allows for temporary reduction of gene expression through the use of artificial transcription factors. Mutating key residues in both DNA cleavage domains of the Cas9 protein (e.g., the D10A and H840A or N863A mutations) results in the generation of a catalytically inactive Cas9 (eiCas9 which is also known as dead Cas9 or dCas9). A catalytically inactive Cas9 complexes with a gRNA and localizes to the DNA sequence specified by that gRNA's targeting domain, however, it does not cleave the target DNA. Fusion of the dCas9 to an effector domain, e.g., a transcription repression domain, enables recruitment of the effector to any DNA site specified by the gRNA. While it has been shown that the eiCas9 itself can block transcription when recruited to early regions in the coding sequence, more robust repression can be achieved by fusing a transcriptional repression domain (for example KRAB, SID or ERD) to the Cas9 and recruiting it to the promoter region of a gene. It is likely that targeting DNAseI hypersensitive regions of the promoter may yield more efficient gene repression or activation because these regions are more likely to be accessible to the Cas9 protein and are also more likely to harbor sites for endogenous transcription factors. Especially for gene repression, it is contemplated herein that blocking the binding site of an endogenous transcription factor would aid in downregulating gene expression. In an embodiment, one or more eiCas9s may be used to block binding of one or more endogenous transcription factors. In another embodiment, an eiCas9 can be fused to a chromatin modifying protein. Altering chromatin status can result in decreased expression of the target gene. One or more eiCas9s fused to one or more chromatin modifying proteins may be used to alter chromatin status.

[0986] In an embodiment, a gRNA molecule can be targeted to a known transcription response elements (e.g., promoters, enhancers, etc.), a known upstream activating sequences (UAS), and/or sequences of unknown or known function that are suspected of being able to control expression of the target DNA.

[0987] CRISPR/Cas-mediated gene knockdown can be used to reduce expression of an unwanted allele or transcript. Contemplated herein are scenarios wherein permanent destruction of the gene is not ideal. In these scenarios, site-specific repression may be used to temporarily reduce or eliminate expression. It is also contemplated herein that the off-target effects of a Cas-repressor may be less severe than those of a Cas-nuclease as a nuclease can cleave any DNA sequence and cause mutations whereas a Cas-repressor may only have an effect if it targets the promoter region of an actively transcribed gene. However, while nuclease-mediated knockout is permanent, repression may only persist as long as the Cas-repressor is present in the cells. Once the repressor is no longer present, it is likely that endogenous transcription factors and gene regulatory elements would restore expression to its natural state.

[0988] V.3 HDR Repair, HDR Mediated Knockin, and Template Nucleic Acids

[0989] As described herein, nuclease-induced homology directed repair (HDR) can be used to alter a target sequence and correct (e.g., repair or edit) a mutation in the genome. While not wishing to be bound by theory, it is believed that alteration of the target sequence occurs by homology-directed repair (HDR) with an exogenously provided donor template or template nucleic acid. For example, the donor template or the template nucleic acid provides for alteration of the target sequence. It is contemplated that a plasmid donor can be used as a template for homologous recombination. It is further contemplated that a single stranded donor template can be used as a template for alteration of the target sequence by alternate methods of homology directed repair (e.g., single strand annealing) between the target sequence and the donor template. Donor template-effected alteration of a target sequence depends on cleavage by a Cas9 molecule. Cleavage by Cas9 can comprise a double strand break or two single strand breaks. As described herein, nuclease-induced homology directed repair (HDR) can be used to alter a target sequence and correct (e.g., repair or edit) a mutation in the genome without the use of an exogenously provided donor template or template nucleic acid. While not wishing to be bound by theory, it is believed that alteration of the target sequence occurs by homology-directed repair (HDR) with endogenous genomic donor sequence. For example, the endogenous genomic donor sequence provides for alteration of the target sequence. It is contemplated that in an embodiment the endogenous genomic donor sequence is located on the same chromosome as the target sequence. It is further contemplated that in another embodiment the endogenous genomic donor sequence is located on a different chromosome from the target sequence. In an embodiment, the endogenous genomic donor sequence comprises one or more nucleotides derived from the HBB gene. Alteration of a target sequence by endogenous genomic donor sequence depends on cleavage by a Cas9 molecule. Cleavage by Cas9 can comprise a double strand break or two single strand breaks.

[0990] Mutations that can be corrected by HDR using a template nucleic acid, or using endogenous genomic donor sequence, include point mutations. In an embodiment, a point mutation can be corrected by either a single double-strand break or two single strand breaks. In an embodiment, a point mutation can be corrected by (1) a single double-strand break, (2) two single strand breaks, (3) two double stranded breaks with a break occurring on each side of the target position, (4) one double stranded break and two single strand breaks with the double strand break and two single strand breaks occurring on each side of the target position (5) four single stranded breaks with a pair of single stranded breaks occurring on each side of the target position, or (6) one single stranded break.

[0991] In an embodiment where a single-stranded template nucleic acid is used, the target position can be altered by alternative HDR.

[0992] Donor template-effected alteration of a target position depends on cleavage by a Cas9 molecule. Cleavage by Cas9 can comprise a nick, a double strand break, or two single strand breaks, e.g., one on each strand of the target nucleic acid. After introduction of the breaks on the target nucleic acid, resection occurs at the break ends resulting in single stranded overhanging DNA regions.

[0993] In canonical HDR, a double-stranded donor template is introduced, comprising homologous sequence to the target nucleic acid that will either be directly incorporated into the target nucleic acid or used as a template to correct the sequence of the target nucleic acid. After resection at the break, repair can progress by different pathways, e.g., by the double Holliday junction model (or double strand break repair, DSBR, pathway) or the synthesis-dependent strand annealing (SDSA) pathway. In the double Holliday junction model, strand invasion by the two single stranded overhangs of the target nucleic acid to the homologous sequences in the donor template occurs, resulting in the formation of an intermediate with two Holliday junctions. The junctions migrate as new DNA is synthesized from the ends of the invading strand to fill the gap resulting from the resection. The end of the newly synthesized DNA is ligated to the resected end, and the junctions are resolved, resulting in the correction of the target nucleic acid, e.g., incorporation of the correct sequence of the donor template at the corresponding target position. Crossover with the donor template may occur upon resolution of the junctions. In the SDSA pathway, only one single stranded overhang invades the donor template and new DNA is synthesized from the end of the invading strand to fill the gap resulting from resection. The newly synthesized DNA then anneals to the remaining single stranded overhang, new DNA is synthesized to fill in the gap, and the strands are ligated to produce the corrected DNA duplex.

[0994] In alternative HDR, a single strand donor template, e.g., template nucleic acid, is introduced. A nick, single strand break, or double strand break at the target nucleic acid, for altering a desired target position, is mediated by a Cas9 molecule, e.g., described herein, and resection at the break occurs to reveal single stranded overhangs. Incorporation of the sequence of the template nucleic acid to correct or alter the target position of the target nucleic acid typically occurs by the SDSA pathway, as described above.

[0995] Methods of promoting HDR pathways, e.g., canonical HDR or alt-HDR, are described herein in Section VI.

[0996] Additional details on template nucleic acids are provided in Section IV entitled “Template nucleic acids” in International Application PCT/US2014/057905.

[0997] Mutations in the HBB gene that can be corrected (e.g., altered) by HDR with a template nucleic acid or with endogenous genomic donor sequence include, e.g., point mutation at E6, e.g., E6V.

[0998] Double Strand Break Mediated Correction or Knockin

[0999] In an embodiment, double strand cleavage is effected by a Cas9 molecule having cleavage activity associated with an HNH-like domain and cleavage activity associated with a RuvC-like domain, e.g., an N-terminal RuvC-like domain, e.g., a wild type Cas9. Such embodiments require only a single gRNA.

[1000] Single Strand Break Mediated Correction or Knockin

[1001] In some embodiments, one single strand break, or nick, is effected by a Cas9 molecule having nickase activity, e.g., a Cas9 nickase as described herein. A nicked target nucleic acid can be a substrate for alt-HDR.

[1002] In other embodiments, two single strand breaks, or nicks, are effected by a Cas9 molecule having nickase activity, e.g., cleavage activity associated with an HNH-like domain or cleavage activity associated with an N-terminal RuvC-like domain. Such embodiments usually require two gRNAs, one for placement of each single strand break. In an embodiment, the Cas9 molecule having nickase activity cleaves the strand to which the gRNA hybridizes, but not the strand that is complementary to the strand to which the gRNA hybridizes. In an embodiment, the Cas9 molecule having nickase activity does not cleave the strand to which the gRNA hybridizes, but rather cleaves the strand that is complementary to the strand to which the gRNA hybridizes.

[1003] In an embodiment, the nickase has HNH activity, e.g., a Cas9 molecule having the RuvC activity inactivated, e.g., a Cas9 molecule having a mutation at D10, e.g., the D10A mutation. D10A inactivates RuvC; therefore, the Cas9 nickase has (only) HNH activity and will cut on the strand to which the gRNA hybridizes (e.g., the complementary strand, which does not have the NGG PAM on it). In other embodiments, a Cas9 molecule having an H840, e.g., an H840A, mutation can be used as a nickase. H840A inactivates HNH; therefore, the Cas9 nickase has (only) RuvC activity and cuts on the non-complementary strand (e.g., the strand that has the NGG PAM and whose sequence is identical to the gRNA). In an embodiment, the Cas9 molecule is an N-terminal RuvC-like domain nickase, e.g., the Cas9 molecule comprises a mutation at N863, e.g., N863A.

[1004] In an embodiment, in which a nickase and two gRNAs are used to position two single strand nicks, one nick is on the + strand and one nick is on the − strand of the target nucleic acid. The PAMs are outwardly facing. The gRNAs can be selected such that the gRNAs are separated by, from about 0-50, 0-100, or 0-200 nucleotides. In an embodiment, there is no overlap between the target sequences that are complementary to the targeting domains of the two gRNAs. In an embodiment, the gRNAs do not overlap and are separated by as much as 50, 100, or 200 nucleotides. In an embodiment, the use of two gRNAs can increase specificity, e.g., by decreasing off-target binding (Ran et al., Cell 2013).

[1005] In an embodiment, a single nick can be used to induce HDR, e.g., alt-HDR. It is contemplated herein that a single nick can be used to increase the ratio of HR to NHEJ at a given cleavage site. In an embodiment, a single strand break is formed in the strand of the target nucleic acid to which the targeting domain of said gRNA is complementary. In another embodiment, a single strand break is formed in the strand of the target nucleic acid other than the strand to which the targeting domain of said gRNA is complementary.

[1006] Placement of the Double Strand Break or a Single Strand Break Relative to the Target Position

[1007] The double strand break or single strand break in one of the strands should be sufficiently close to target position such that an alteration is produced in the desired region, e.g., correction of a mutation occurs. In an embodiment, the distance is not more than 10, 25, 50, 100, 200, 300, 350, 400 or 500 nucleotides. While not wishing to be bound by theory, in some embodiments, it is believed that the break should be sufficiently close to target position such that the target position is within the region that is subject to exonuclease-mediated removal during end resection. If the distance between the target position and a break is too great, the mutation or other sequence desired to be altered may not be included in the end resection and, therefore, may not be corrected, as donor sequence, either exogenously provided donor sequence or endogenous genomic donor sequence, in some embodiments is only used to correct sequence within the end resection region.

[1008] In an embodiment, the targeting domain is configured such that a cleavage event, e.g., a double strand or single strand break, is positioned within 1, 2, 3, 4, 5, 10, 15, 20, 25, 30, 35, 40, 45, 50, 60, 70, 80, 90, 100, 150, 200, 300, 350, 400 or 500 nucleotides of the region desired to be altered, e.g., a mutation. The break, e.g., a double strand or single strand break, can be positioned upstream or downstream of the region desired to be altered, e.g., a mutation. In some embodiments, a break is positioned within the region desired to be altered, e.g., within a region defined by at least two mutant nucleotides. In some embodiments, a break is positioned immediately adjacent to the region desired to be altered, e.g., immediately upstream or downstream of a mutation.

[1009] In an embodiment, a single strand break is accompanied by an additional single strand break, positioned by a second gRNA molecule, as discussed below. For example, the targeting domains are configured such that a cleavage event, e.g., the two single strand breaks, are positioned within 1, 2, 3, 4, 5, 10, 15, 20, 25, 30, 35, 40, 45, 50, 60, 70, 80, 90, 100, 150, 200, 300, 350, 400 or 500 nucleotides of a target position. In an embodiment, the first and second gRNA molecules are configured such, that when guiding a Cas9 nickase, a single strand break will be accompanied by an additional single strand break, positioned by a second gRNA, sufficiently close to one another to result in alteration of the desired region. In an embodiment, the first and second gRNA molecules are configured such that a single strand break positioned by said second gRNA is within 10, 20, 30, 40, or 50 nucleotides of the break positioned by said first gRNA molecule, e.g., when the Cas9 is a nickase. In an embodiment, the two gRNA molecules are configured to position cuts at the same position, or within a few nucleotides of one another, on different strands, e.g., essentially mimicking a double strand break.

[1010] In an embodiment, in which a gRNA (unimolecular (or chimeric) or modular gRNA) and Cas9 nuclease induce a double strand break for the purpose of inducing HDR-mediated correction, the cleavage site is between 0-200 bp (e.g., 0-175, 0 to 150, 0 to 125, 0 to 100, 0 to 75, 0 to 50, 0 to 25, 25 to 200, 25 to 175, 25 to 150, 25 to 125, 25 to 100, 25 to 75, 25 to 50, 50 to 200, 50 to 175, 50 to 150, 50 to 125, 50 to 100, 50 to 75, 75 to 200, 75 to 175, 75 to 150, 75 to 125, 75 to 100 bp) away from the target position. In an embodiment, the cleavage site is between 0-100 bp (e.g., 0 to 75, 0 to 50, 0 to 25, 25 to 100, 25 to 75, 25 to 50, 50 to 100, 50 to 75 or 75 to 100 bp) away from the target position.

[1011] In embodiments, one can promote HDR by using nickases to generate a break with overhangs. While not wishing to be bound by theory, the single stranded nature of the overhangs can enhance the cell's likelihood of repairing the break by HDR as opposed to, e.g., NHEJ. Specifically, in some embodiments, HDR is promoted by selecting a first gRNA that targets a first nickase to a first target sequence, and a second gRNA that targets a second nickase to a second target sequence which is on the opposite DNA strand from the first target sequence and offset from the first nick.

[1012] In an embodiment, the targeting domain of a gRNA molecule is configured to position a cleavage event sufficiently far from a preselected nucleotide, e.g., the nucleotide of a coding region, such that the nucleotide is not altered. In an embodiment, the targeting domain of a gRNA molecule is configured to position an intronic cleavage event sufficiently far from an intron/exon border, or naturally occurring splice signal, to avoid alteration of the exonic sequence or unwanted splicing events. The gRNA molecule may be a first, second, third and/or fourth gRNA molecule, as described herein.

[1013] Placement of a First Break and a Second Break Relative to Each Other

[1014] In an embodiment, a double strand break can be accompanied by an additional double strand break, positioned by a second gRNA molecule, as is discussed below.

[1015] In an embodiment, a double strand break can be accompanied by two additional single strand breaks, positioned by a second gRNA molecule and a third gRNA molecule.

[1016] In an embodiment, a first and second single strand breaks can be accompanied by two additional single strand breaks positioned by a third gRNA molecule and a fourth gRNA molecule.

[1017] When two or more gRNAs are used to position two or more cleavage events, e.g., double strand or single strand breaks, in a target nucleic acid, it is contemplated that the two or more cleavage events may be made by the same or different Cas9 proteins. For example, when two gRNAs are used to position two double stranded breaks, a single Cas9 nuclease may be used to create both double stranded breaks. When two or more gRNAs are used to position two or more single stranded breaks (nicks), a single Cas9 nickase may be used to create the two or more nicks. When two or more gRNAs are used to position at least one double stranded break and at least one single stranded break, two Cas9 proteins may be used, e.g., one Cas9 nuclease and one Cas9 nickase. It is contemplated that when two or more Cas9 proteins are used that the two or more Cas9 proteins may be delivered sequentially to control specificity of a double stranded versus a single stranded break at the desired position in the target nucleic acid.

[1018] In some embodiments, the targeting domain of the first gRNA molecule and the targeting domain of the second gRNA molecules are complementary to opposite strands of the target nucleic acid molecule. In some embodiments, the gRNA molecule and the second gRNA molecule are configured such that the PAMs are oriented outward.

[1019] In certain embodiments, two gRNA are selected to direct Cas9-mediated cleavage at two positions that are a preselected distance from each other. In embodiments, the two points of cleavage are on opposite strands of the target nucleic acid. In some embodiments, the two cleavage points form a blunt ended break, and in other embodiments, they are offset so that the DNA ends comprise one or two overhangs (e.g., one or more 5′ overhangs and/or one or more 3′ overhangs). In some embodiments, each cleavage event is a nick. In embodiments, the nicks are close enough together that they form a break that is recognized by the double stranded break machinery (as opposed to being recognized by, e.g., the SSBr machinery). In embodiments, the nicks are far enough apart that they create an overhang that is a substrate for HDR, i.e., the placement of the breaks mimics a DNA substrate that has experienced some resection. For instance, in some embodiments the nicks are spaced to create an overhang that is a substrate for processive resection. In some embodiments, the two breaks are spaced within 25-65 nucleotides of each other. The two breaks may be, e.g., about 25, 30, 35, 40, 45, 50, 55, 60 or 65 nucleotides of each other. The two breaks may be, e.g., at least about 25, 30, 35, 40, 45, 50, 55, 60 or 65 nucleotides of each other. The two breaks may be, e.g., at most about 30, 35, 40, 45, 50, 55, 60 or 65 nucleotides of each other. In embodiments, the two breaks are about 25-30, 30-35, 35-40, 40-45, 45-50, 50-55, 55-60, or 60-65 nucleotides of each other.

[1020] In some embodiments, the break that mimics a resected break comprises a 3′ overhang (e.g., generated by a DSB and a nick, where the nick leaves a 3′ overhang), a 5′ overhang (e.g., generated by a DSB and a nick, where the nick leaves a 5′ overhang), a 3′ and a 5′ overhang (e.g., generated by three cuts), two 3′ overhangs (e.g., generated by two nicks that are offset from each other), or two 5′ overhangs (e.g., generated by two nicks that are offset from each other).

[1021] In an embodiment, in which two gRNAs (independently, unimolecular (or chimeric) or modular gRNA) complexing with Cas9 nickases induce two single strand breaks for the purpose of inducing HDR-mediated correction, the closer nick is between 0-200 bp (e.g., 0-175, 0 to 150, 0 to 125, 0 to 100, 0 to 75, 0 to 50, 0 to 25, 25 to 200, 25 to 175, 25 to 150, 25 to 125, 25 to 100, 25 to 75, 25 to 50, 50 to 200, 50 to 175, 50 to 150, 50 to 125, 50 to 100, 50 to 75, 75 to 200, 75 to 175, 75 to 150, 75 to 125, 75 to 100 bp) away from the target position and the two nicks will ideally be within 25-65 bp of each other (e.g., 25 to 50, 25 to 45, 25 to 40, 25 to 35, 25 to 30, 30 to 55, 30 to 50, 30 to 45, 30 to 40, 30 to 35, 35 to 55, 35 to 50, 35 to 45, 35 to 40, 40 to 55, 40 to 50, 40 to 45 bp, 45 to 50 bp, 50 to 55 bp, 55 to 60 bp, 60 to 65 bp) and no more than 100 bp away from each other (e.g., no more than 90, 80, 70, 60, 50, 40, 30, 20, 10 or 5 bp away from each other). In an embodiment, the cleavage site is between 0-100 bp (e.g., 0 to 75, 0 to 50, 0 to 25, 25 to 100, 25 to 75, 25 to 50, 50 to 100, 50 to 75 or 75 to 100 bp) away from the target position.

[1022] In one embodiment, two gRNAs, e.g., independently, unimolecular (or chimeric) or modular gRNA, are configured to position a double-strand break on both sides of a target position. In an alternate embodiment, three gRNAs, e.g., independently, unimolecular (or chimeric) or modular gRNA, are configured to position a double strand break (i.e., one gRNA complexes with a cas9 nuclease) and two single strand breaks or paired single stranded breaks (i.e., two gRNAs complex with Cas9 nickases) on either side of the target position. In another embodiment, four gRNAs, e.g., independently, unimolecular (or chimeric) or modular gRNA, are configured to generate two pairs of single stranded breaks (i.e., two pairs of two gRNAs complex with Cas9 nickases) on either side of the target position. The double strand break(s) or the closer of the two single strand nicks in a pair will ideally be within 0-500 bp of the target position (e.g., no more than 450, 400, 350, 300, 250, 200, 150, 100, 50 or 25 bp from the target position). When nickases are used, the two nicks in a pair are, in embodiments, within 25-65 bp of each other (e.g., between 25 to 55, 25 to 50, 25 to 45, 25 to 40, 25 to 35, 25 to 30, 50 to 55, 45 to 55, 40 to 55, 35 to 55, 30 to 55, 30 to 50, 35 to 50, 40 to 50, 45 to 50, 35 to 45, 40 to 45 bp, 45 to 50 bp, 50 to 55 bp, 55 to 60 bp, or 60 to 65 bp) and no more than 100 bp away from each other (e.g., no more than 90, 80, 70, 60, 50, 40, 30, 20 or 10 bp).

[1023] When two gRNAs are used to target Cas9 molecules to breaks, different combinations of Cas9 molecules are envisioned. In some embodiments, a first gRNA is used to target a first Cas9 molecule to a first target position, and a second gRNA is used to target a second Cas9 molecule to a second target position. In some embodiments, the first Cas9 molecule creates a nick on the first strand of the target nucleic acid, and the second Cas9 molecule creates a nick on the opposite strand, resulting in a double stranded break (e.g., a blunt ended cut or a cut with overhangs).

[1024] Different combinations of nickases can be chosen to target one single stranded break to one strand and a second single stranded break to the opposite strand. When choosing a combination, one can take into account that there are nickases having one active RuvC-like domain, and nickases having one active HNH domain. In an embodiment, a RuvC-like domain cleaves the non-complementary strand of the target nucleic acid molecule. In an embodiment, an HNH-like domain cleaves a single stranded complementary domain, e.g., a complementary strand of a double stranded nucleic acid molecule. Generally, if both Cas9 molecules have the same active domain (e.g., both have an active RuvC domain or both have an active HNH domain), one will choose two gRNAs that bind to opposite strands of the target. In more detail, in some embodiments, a first gRNA is complementary with a first strand of the target nucleic acid and binds a nickase having an active RuvC-like domain and causes that nickase to cleave the strand that is non-complementary to that first gRNA, i.e., a second strand of the target nucleic acid; and a second gRNA is complementary with a second strand of the target nucleic acid and binds a nickase having an active RuvC-like domain and causes that nickase to cleave the strand that is non-complementary to that second gRNA, i.e., the first strand of the target nucleic acid. Conversely, in some embodiments, a first gRNA is complementary with a first strand of the target nucleic acid and binds a nickase having an active HNH domain and causes that nickase to cleave the strand that is complementary to that first gRNA, i.e., a first strand of the target nucleic acid; and a second gRNA is complementary with a second strand of the target nucleic acid and binds a nickase having an active HNH domain and causes that nickase to cleave the strand that is complementary to that second gRNA, i.e., the second strand of the target nucleic acid. In another arrangement, if one Cas9 molecule has an active RuvC-like domain and the other Cas9 molecule has an active HNH domain, the gRNAs for both Cas9 molecules can be complementary to the same strand of the target nucleic acid, so that the Cas9 molecule with the active RuvC-like domain will cleave the non-complementary strand and the Cas9 molecule with the HNH domain will cleave the complementary strand, resulting in a double stranded break.

[1025] Length of the Homology Arms of the Donor Template

[1026] The homology arm should extend at least as far as the region in which end resection may occur, e.g., in order to allow the resected single stranded overhang to find a complementary region within the donor template. The overall length could be limited by parameters such as plasmid size or viral packaging limits. In an embodiment, a homology arm does not extend into repeated elements, e.g., ALU repeats or LINE repeats.

[1027] Exemplary homology arm lengths include at least 50, 100, 250, 500, 750, 1000, 2000, 3000, 4000, or 5000 nucleotides. In some embodiments, the homology arm length is 50-100, 100-250, 250-500, 500-750, 750-1000, 1000-2000, 2000-3000, 3000-4000, or 4000-5000 nucleotides.

[1028] Target position, as used herein, refers to a site on a target nucleic acid (e.g., the chromosome) that is modified by a Cas9 molecule-dependent process. For example, the target position can be a modified Cas9 molecule cleavage of the target nucleic acid and template nucleic acid directed modification, e.g., correction, of the target position. In an embodiment, a target position can be a site between two nucleotides, e.g., adjacent nucleotides, on the target nucleic acid into which one or more nucleotides is added. The target position may comprise one or more nucleotides that are altered, e.g., corrected, by a template nucleic acid. In an embodiment, the target position is within a target sequence (e.g., the sequence to which the gRNA binds). In an embodiment, a target position is upstream or downstream of a target sequence (e.g., the sequence to which the gRNA binds).

[1029] A template nucleic acid, as that term is used herein, refers to a nucleic acid sequence which can be used in conjunction with a Cas9 molecule and a gRNA molecule to alter the structure of a target position. In an embodiment, the target nucleic acid is modified to have the some or all of the sequence of the template nucleic acid, typically at or near cleavage site(s). In an embodiment, the template nucleic acid is single stranded. In an alternate embodiment, the template nucleic acid is double stranded. In an embodiment, the template nucleic acid is DNA, e.g., double stranded DNA. In an alternate embodiment, the template nucleic acid is single stranded DNA. In an embodiment, the template nucleic acid is encoded on the same vector backbone, e.g. AAV genome, plasmid DNA, as the Cas9 and gRNA. In an embodiment, the template nucleic acid is excised from a vector backbone in vivo, e.g., it is flanked by gRNA recognition sequences. In an embodiment, the template nucleic acid comprises endogenous genomic sequence

[1030] In an embodiment, the template nucleic acid alters the structure of the target position by participating in a homology directed repair event. In an embodiment, the template nucleic acid alters the sequence of the target position. In an embodiment, the template nucleic acid results in the incorporation of a modified, or non-naturally occurring base into the target nucleic acid.

[1031] Typically, the template sequence undergoes a breakage mediated or catalyzed recombination with the target sequence. In an embodiment, the template nucleic acid includes sequence that corresponds to a site on the target sequence that is cleaved by an eaCas9 mediated cleavage event. In an embodiment, the template nucleic acid includes sequence that corresponds to both, a first site on the target sequence that is cleaved in a first Cas9 mediated event, and a second site on the target sequence that is cleaved in a second Cas9 mediated event.

[1032] In an embodiment, the template nucleic acid can include sequence which results in an alteration in the coding sequence of a translated sequence, e.g., one which results in the substitution of one amino acid for another in a protein product, e.g., transforming a mutant allele into a wild type allele, transforming a wild type allele into a mutant allele, and/or introducing a stop codon, insertion of an amino acid residue, deletion of an amino acid residue, or a nonsense mutation.

[1033] In other embodiments, the template nucleic acid can include sequence which results in an alteration in a non-coding sequence, e.g., an alteration in an exon or in a 5′ or 3′ non-translated or non-transcribed region. Such alterations include an alteration in a control element, e.g., a promoter, enhancer, and an alteration in a cis-acting or trans-acting control element.

[1034] A template nucleic acid having homology with a target position in the HBB gene can be used to alter the structure of a target sequence. The template sequence can be used to alter an unwanted structure, e.g., an unwanted or mutant nucleotide.

[1035] A template nucleic acid typically comprises the following components:

[1036] [5′ homology arm]-[replacement sequence]-[3′ homology arm].

[1037] The homology arms provide for recombination into the chromosome, thus replacing the undesired element, e.g., a mutation or signature, with the replacement sequence. In an embodiment, the homology arms flank the most distal cleavage sites.

[1038] In an embodiment, the 3′ end of the 5′ homology arm is the position next to the 5′ end of the replacement sequence. In an embodiment, the 5′ homology arm can extend at least 10, 20, 30, 40, 50, 100, 200, 300, 400, 500, 600, 700, 800, 900, 1000, 1500, 2000, 3000, 4000, or 5000 nucleotides 5′ from the 5′ end of the replacement sequence.

[1039] In an embodiment, the 5′ end of the 3′ homology arm is the position next to the 3′ end of the replacement sequence. In an embodiment, the 3′ homology arm can extend at least 10, 20, 30, 40, 50, 100, 200, 300, 400, 500, 600, 700, 800, 900, 1000, 1500, 2000, 3000, 4000, or 5000 nucleotides 3′ from the 3′ end of the replacement sequence.

[1040] In an embodiment, to correct a mutation, the homology arms, e.g., the 5′ and 3′ homology arms, may each comprise about 1000 base pairs (bp) of sequence flanking the most distal gRNAs (e.g., 1000 bp of sequence on either side of the mutation).

[1041] It is contemplated herein that one or both homology arms may be shortened to avoid including certain sequence repeat elements, e.g., Alu repeats or LINE elements. For example, a 5′ homology arm may be shortened to avoid a sequence repeat element. In other embodiments, a 3′ homology arm may be shortened to avoid a sequence repeat element. In some embodiments, both the 5′ and the 3′ homology arms may be shortened to avoid including certain sequence repeat elements.

[1042] It is contemplated herein that template nucleic acids for correcting a mutation may be designed for use as a single-stranded oligonucleotide, e.g., a single-stranded oligodeoxynucleotide (ssODN). When using a ssODN, 5′ and 3′ homology arms may range up to about 200 base pairs (bp) in length, e.g., at least 25, 50, 75, 100, 125, 150, 175, or 200 bp in length. Longer homology arms are also contemplated for ssODNs as improvements in oligonucleotide synthesis continue to be made. In some embodiments, a longer homology arm is made by a method other than chemical synthesis, e.g., by denaturing a long double stranded nucleic acid and purifying one of the strands, e.g., by affinity for a strand-specific sequence anchored to a solid substrate.

[1043] While not wishing to be bound by theory, in some embodiments alt-HDR proceeds more efficiently when the template nucleic acid has extended homology 5′ to the nick (i.e., in the 5′ direction of the nicked strand). Accordingly, in some embodiments, the template nucleic acid has a longer homology arm and a shorter homology arm, wherein the longer homology arm can anneal 5′ of the nick. In some embodiments, the arm that can anneal 5′ to the nick is at least 25, 50, 75, 100, 125, 150, 175, or 200, 300, 400, 500, 600, 700, 800, 900, 1000, 1500, 2000, 3000, 4000, or 5000 nucleotides from the nick or the 5′ or 3′ end of the replacement sequence. In some embodiments, the arm that can anneal 5′ to the nick is at least 10%, 20%, 30%, 40%, or 50% longer than the arm that can anneal 3′ to the nick. In some embodiments, the arm that can anneal 5′ to the nick is at least 2×, 3×, 4×, or 5× longer than the arm that can anneal 3′ to the nick. Depending on whether a ssDNA template can anneal to the intact strand or the nicked strand, the homology arm that anneals 5′ to the nick may be at the 5′ end of the ssDNA template or the 3′ end of the ssDNA template, respectively.

[1044] Similarly, in some embodiments, the template nucleic acid has a 5′ homology arm, a replacement sequence, and a 3′ homology arm, such that the template nucleic acid has extended homology to the 5′ of the nick. For example, the 5′ homology arm and 3′ homology arm may be substantially the same length, but the replacement sequence may extend farther 5′ of the nick than 3′ of the nick. In some embodiments, the replacement sequence extends at least 10%, 20%, 30%, 40%, 50%, 2×, 3×, 4×, or 5× further to the 5′ end of the nick than the 3′ end of the nick. While not wishing to be bound by theory, in some embodiments alt-HDR proceeds more efficiently when the template nucleic acid is centered on the nick. Accordingly, in some embodiments, the template nucleic acid has two homology arms that are essentially the same size. For instance, the first homology arm of a template nucleic acid may have a length that is within 10%, 9%, 8%, 7%, 6%, 5%, 4%, 3%, 2%, or 1% of the second homology arm of the template nucleic acid.

[1045] Similarly, in some embodiments, the template nucleic acid has a 5′ homology arm, a replacement sequence, and a 3′ homology arm, such that the template nucleic acid extends substantially the same distance on either side of the nick. For example, the homology arms may have different lengths, but the replacement sequence may be selected to compensate for this. For example, the replacement sequence may extend further 5′ from the nick than it does 3′ of the nick, but the homology arm 5′ of the nick is shorter than the homology arm 3′ of the nick, to compensate. The converse is also possible, e.g., that the replacement sequence may extend further 3′ from the nick than it does 5′ of the nick, but the homology arm 3′ of the nick is shorter than the homology arm 5′ of the nick, to compensate.

[1046] Exemplary Arrangements of Linear Nucleic Acid Template Systems

[1047] In an embodiment, the nucleic acid template system is double stranded. In an embodiment, the nucleic acid template system is single stranded. In an embodiment, the nucleic acid template system comprises a single stranded portion and a double stranded portion. In an embodiment, the template nucleic acid comprises about 50 to 100, e.g., 55 to 95, 60 to 90, 65 to 85, or 70 to 80, base pairs, homology on either side of the nick and/or replacement sequence. In an embodiment, the template nucleic acid comprises about 50, 55, 60, 65, 70, 75, 80, 85, 90, 95, or 100 base pairs homology 5′ of the nick or replacement sequence, 3′ of the nick or replacement sequence, or both 5′ and 3′ of the nick or replacement sequences.

[1048] In an embodiment, the template nucleic acid comprises about 150 to 200, e.g., 155 to 195, 160 to 190, 165 to 185, or 170 to 180, base pairs homology 3′ of the nick and/or replacement sequence. In an embodiment, the template nucleic acid comprises about 150, 155, 160, 165, 170, 175, 180, 185, 190, 195, or 200 base pairs homology 3′ of the nick or replacement sequence. In an embodiment, the template nucleic acid comprises less than about 100, 90, 80, 70, 60, 50, 40, 30, 20, 15, or 10 base pairs homology 5′ of the nick or replacement sequence.

[1049] In an embodiment, the template nucleic acid comprises about 150 to 200, e.g., 155 to 195, 160 to 190, 165 to 185, or 170 to 180, base pairs homology 5′ of the nick and/or replacement sequence. In an embodiment, the template nucleic acid comprises about 150, 155, 160, 165, 170, 175, 180, 185, 190, 195, or 200 base pairs homology 5′ of the nick or replacement sequence. In an embodiment, the template nucleic acid comprises less than about 100, 90, 80, 70, 60, 50, 40, 30, 20, 15, or 10 base pairs homology 3′ of the nick or replacement sequence.

[1050] Exemplary Template Nucleic Acids

[1051] In an embodiment, the template nucleic acid is a single stranded nucleic acid. In another embodiment, the template nucleic acid is a double stranded nucleic acid. In some embodiments, the template nucleic acid comprises a nucleotide sequence, e.g., of one or more nucleotides, that will be added to or will template a change in the target nucleic acid. In other embodiments, the template nucleic acid comprises a nucleotide sequence that may be used to modify the target position. In other embodiments, the template nucleic acid comprises a nucleotide sequence, e.g., of one or more nucleotides, that corresponds to wild type sequence of the target nucleic acid, e.g., of the target position.

[1052] The template nucleic acid may comprise a replacement sequence. In some embodiments, the template nucleic acid comprises a 5′ homology arm. In other embodiments, the template nucleic acid comprises a 3′ homology arm.

[1053] In embodiments, the template nucleic acid is linear double stranded DNA. The length may be, e.g., about 150-200 base pairs, e.g., about 150, 160, 170, 180, 190, or 200 base pairs. The length may be, e.g., at least 150, 160, 170, 180, 190, or 200 base pairs. In some embodiments, the length is no greater than 150, 160, 170, 180, 190, or 200 base pairs. In some embodiments, a double stranded template nucleic acid has a length of about 160 base pairs, e.g., about 155-165, 150-170, 140-180, 130-190, 120-200, 110-210, 100-220, 90-230, or 80-240 base pairs.

[1054] The template nucleic acid can be linear single stranded DNA. In embodiments, the template nucleic acid is (i) linear single stranded DNA that can anneal to the nicked strand of the target nucleic acid, (ii) linear single stranded DNA that can anneal to the intact strand of the target nucleic acid, (iii) linear single stranded DNA that can anneal to the transcribed strand of the target nucleic acid, (iv) linear single stranded DNA that can anneal to the non-transcribed strand of the target nucleic acid, or more than one of the preceding. The length may be, e.g., about 150-200 nucleotides, e.g., about 150, 160, 170, 180, 190, or 200 nucleotides. The length may be, e.g., at least 150, 160, 170, 180, 190, or 200 nucleotides. In some embodiments, the length is no greater than 150, 160, 170, 180, 190, or 200 nucleotides. In some embodiments, a single stranded template nucleic acid has a length of about 160 nucleotides, e.g., about 155-165, 150-170, 140-180, 130-190, 120-200, 110-210, 100-220, 90-230, or 80-240 nucleotides.

[1055] In some embodiments, the template nucleic acid is circular double stranded DNA, e.g., a plasmid. In some embodiments, the template nucleic acid comprises about 500 to 1000 base pairs of homology on either side of the replacement sequence and/or the nick. In some embodiments, the template nucleic acid comprises about 300, 400, 500, 600, 700, 800, 900, 1000, 1500, or 2000 base pairs of homology 5′ of the nick or replacement sequence, 3′ of the nick or replacement sequence, or both 5′ and 3′ of the nick or replacement sequence. In some embodiments, the template nucleic acid comprises at least 300, 400, 500, 600, 700, 800, 900, 1000, 1500, or 2000 base pairs of homology 5′ of the nick or replacement sequence, 3′ of the nick or replacement sequence, or both 5′ and 3′ of the nick or replacement sequence. In some embodiments, the template nucleic acid comprises no more than 300, 400, 500, 600, 700, 800, 900, 1000, 1500, or 2000 base pairs of homology 5′ of the nick or replacement sequence, 3′ of the nick or replacement sequence, or both 5′ and 3′ of the nick or replacement sequence.

[1056] In some embodiments, the template nucleic acid is an adenovirus vector, e.g., an AAV vector, e.g., a ssDNA molecule of a length and sequence that allows it to be packaged in an AAV capsid. The vector may be, e.g., less than 5 kb and may contain an ITR sequence that promotes packaging into the capsid. The vector may be integration-deficient. In some embodiments, the template nucleic acid comprises about 150 to 1000 nucleotides of homology on either side of the replacement sequence and/or the nick. In some embodiments, the template nucleic acid comprises about 100, 150, 200, 300, 400, 500, 600, 700, 800, 900, 1000, 1500, or 2000 nucleotides 5′ of the nick or replacement sequence, 3′ of the nick or replacement sequence, or both 5′ and 3′ of the nick or replacement sequence. In some embodiments, the template nucleic acid comprises at least 100, 150, 200, 300, 400, 500, 600, 700, 800, 900, 1000, 1500, or 2000 nucleotides 5′ of the nick or replacement sequence, 3′ of the nick or replacement sequence, or both 5′ and 3′ of the nick or replacement sequence. In some embodiments, the template nucleic acid comprises at most 100, 150, 200, 300, 400, 500, 600, 700, 800, 900, 1000, 1500, or 2000 nucleotides 5′ of the nick or replacement sequence, 3′ of the nick or replacement sequence, or both 5′ and 3′ of the nick or replacement sequence.

[1057] In some embodiments, the template nucleic acid is a lentiviral vector, e.g., an IDLV (integration deficiency lentivirus). In some embodiments, the template nucleic acid comprises about 500 to 1000 base pairs of homology on either side of the replacement sequence and/or the nick. In some embodiments, the template nucleic acid comprises about 300, 400, 500, 600, 700, 800, 900, 1000, 1500, or 2000 base pairs of homology 5′ of the nick or replacement sequence, 3′ of the nick or replacement sequence, or both 5′ and 3′ of the nick or replacement sequence. In some embodiments, the template nucleic acid comprises at least 300, 400, 500, 600, 700, 800, 900, 1000, 1500, or 2000 base pairs of homology 5′ of the nick or replacement sequence, 3′ of the nick or replacement sequence, or both 5′ and 3′ of the nick or replacement sequence. In some embodiments, the template nucleic acid comprises no more than 300, 400, 500, 600, 700, 800, 900, 1000, 1500, or 2000 base pairs of homology 5′ of the nick or replacement sequence, 3′ of the nick or replacement sequence, or both 5′ and 3′ of the nick or replacement sequence.

[1058] In many embodiments, the template nucleic acid comprises one or more mutations, e.g., silent mutations, that prevent Cas9 from recognizing and cleaving the template nucleic acid. The template nucleic acid may comprise, e.g., at least 1, 2, 3, 4, 5, 10, 20, or 30 silent mutations relative to the corresponding sequence in the genome of the cell to be altered. In embodiments, the template nucleic acid comprises at most 2, 3, 4, 5, 10, 20, 30, or 50 silent mutations relative to the corresponding sequence in the genome of the cell to be altered. In an embodiment, the cDNA comprises one or more mutations, e.g., silent mutations that prevent Cas9 from recognizing and cleaving the template nucleic acid. The template nucleic acid may comprise, e.g., at least 1, 2, 3, 4, 5, 10, 20, or 30 silent mutations relative to the corresponding sequence in the genome of the cell to be altered. In embodiments, the template nucleic acid comprises at most 2, 3, 4, 5, 10, 20, 30, or 50 silent mutations relative to the corresponding sequence in the genome of the cell to be altered.

[1059] In an embodiment, the template nucleic acid alters the structure of the target position by participating in a homology directed repair event. In an embodiment, the template nucleic acid alters the sequence of the target position. In an embodiment, the template nucleic acid results in the incorporation of a modified, or non-naturally occurring base into the target nucleic acid.

[1060] Typically, the template sequence undergoes a breakage mediated or catalyzed recombination with the target sequence. In an embodiment, the template nucleic acid includes sequence that corresponds to a site on the target sequence that is cleaved by an eaCas9 mediated cleavage event. In an embodiment, the template nucleic acid includes sequence that corresponds to both, a first site on the target sequence that is cleaved in a first Cas9 mediated event, and a second site on the target sequence that is cleaved in a second Cas9 mediated event.

[1061] In an embodiment, the template nucleic acid can include sequence which results in an alteration in the coding sequence of a translated sequence, e.g., one which results in the substitution of one amino acid for another in a protein product, e.g., transforming a mutant allele into a wild type allele, transforming a wild type allele into a mutant allele, and/or introducing a stop codon, insertion of an amino acid residue, deletion of an amino acid residue, or a nonsense mutation.

[1062] In other embodiments, the template nucleic acid can include sequence which results in an alteration in a non-coding sequence, e.g., an alteration in an exon or in a 5′ or 3′ non-translated or non-transcribed region. Such alterations include an alteration in a control element, e.g., a promoter, enhancer, and an alteration in a cis-acting or trans-acting control element. A template nucleic acid having homology with a target position can be used to alter the structure of a target sequence. The template sequence can be used to alter an unwanted structure, e.g., an unwanted or mutant nucleotide.

[1063] Exemplary template nucleic acids (also referred to herein as donor constructs) to correction a mutation, e.g., at E6, e.g., E6V, in the HBB gene, are provided.

[1064] Suitable sequence for the 5′ homology arm can be selected from (e.g., includes a portion of) or include the following sequence:

(5′H arm)

SEQ ID NO: 391

ATAGGAACTTGAATCAAGGAAATGATTTTAAAACGCAGTATTCTTAGTGG
ACTAGAGGAAAAAAATAATCTGAGCCAAGTAGAAGACCTTTTCCCCTCCT
ACCCCTACTTTCTAAGTCACAGAGGCTTTTTGTTCCCCCAGACACTCTTG
CAGATTAGTCCAGGCAGAAACAGTTAGATGTCCCCAGTTAACCTCCTATT
TGACACCACTGATTACCCCATTGATAGTCACACTTTGGGTTGTAAGTGAC
TTTTTATTTATTTGTATTTTTGACTGCATTAAGAGGTCTCTAGTTTTTTA
TCTCTTGTTTCCCAAAACCTAATAAGTAACTAATGCACAGAGCACATTGA
TTTGTATTTATTCTATTTTTAGACATAATTTATTAGCATGCATGAGCAAA
TTAAGAAAAACAACAACAAATGAATGCATATATATGTATATGTATGTGTG
TATATATACACACATATATATATATATTTTTTCTTTTCTTACCAGAAGGT
TTTAATCCAAATAAGGAGAAGATATGCTTAGAACCGAGGTAGAGTTTTCA
TCCATTCTGTCCTGTAAGTATTTTGCATATTCTGGAGACGCAGGAAGAGA
TCCATCTACATATCCCAAAGCTGAATTATGGTAGACAAAACTCTTCCACT
TTTAGTGCATCAACTTCTTATTTGTGTAATAAGAAAATTGGGAAAACGAT
CTTCAATATGCTTACCAAGCTGTGATTCCAAATATTACGTAAATACACTT
GCAAAGGAGGATGTTTTTAGTAGCAATTTGTACTGATGGTATGGGGCCAA
GAGATATATCTTAGAGGGAGGGCTGAGGGTTTGAAGTCCAACTCCTAAGC
CAGTGCCAGAAGAGCCAAGGACAGGTACGGCTGTCATCACTTAGACCTCA
CCCTGTGGAGCCACACCCTAGGGTTGGCCAATCTACTCCCAGGAGCAGGG
AGGGCAGGAGCCAGGGCTGGGCATAAAAGTCAGGGCAGAGCCATCTATTG
CTTACATTTGCTTCTGACACAACTGTGTTCACTAGCAACCTCAAACAGAC
ACCATGGTGCATCTGACTCCTG

[1065] Suitable sequence for the 3′ homology arm can be selected from (e.g., includes a portion of) or include the following sequence:

(3′H arm)

SEQ ID NO: 392

GGAGAAGTCTGCCGTTACTGCCCTGTGGGGCAAGGTGAACGTGGATGAAG
TTGGTGGTGAGGCCCTGGGCAGGTTGGTATCAAGGTTACAAGACAGGTTT
AAGGAGACCAATAGAAACTGGGCATGTGGAGACAGAGAAGACTCTTGGGT
TTCTGATAGGCACTGACTCTCTCTGCCTATTGGTCTATTTTCCCACCCTT
AGGCTGCTGGTGGTCTACCCTTGGACCCAGAGGTTCTTTGAGTCCTTTGG
GGATCTGTCCACTCCTGATGCTGTTATGGGCAACCCTAAGGTGAAGGCTC
ATGGCAAGAAAGTGCTCGGTGCCTTTAGTGATGGCCTGGCTCACCTGGAC
AACCTCAAGGGCACCTTTGCCACACTGAGTGAGCTGCACTGTGACAAGCT
GCACGTGGATCCTGAGAACTTCAGGGTGAGTCTATGGGACGCTTGATGTT
TTCTTTCCCCTTCTTTTCTATGGTTAAGTTCATGTCATAGGAAGGGGATA
AGTAACAGGGTACAGTTTAGAATGGGAAACAGACGAATGATTGCATCAGT
GTGGAAGTCTCAGGATCGTTTTAGTTTCTTTTATTTGCTGTTCATAACAA
TTGTTTTCTTTTGTTTAATTCTTGCTTTCTTTTTTTTTCTTCTCCGCAAT
TTTTACTATTATACTTAATGCCTTAACATTGTGTATAACAAAAGGAAATA
TCTCTGAGATACATTAAGTAACTTAAAAAAAAACTTTACACAGTCTGCCT
AGTACATTACTATTTGGAATATATGTGTGCTTATTTGCATATTCATAATC
TCCCTACTTTATTTTCTTTTATTTTTAATTGATACATAATCATTATACAT
ATTTATGGGTTAAAGTGTAATGTTTTAATATGTGTACACATATTGACCAA
ATCAGGGTAATTTTGCATTTGTAATTTTAAAAAATGCTTTCTTCTTTTAA
TATACTTTTTTGTTTATCTTATTTCTAATACTTTCCCTAATCTCTTTCTT
TCAGGGCAATAATGATACAATGTATCATGCCTCTTTGCACCATTCTAAAG
AATAACAGTGATAATTTCTGGGTTAAGGCAATAGCAATATCTCTGCATAT
AAATATTTCTGCATATAAATTGTAACTG

[1066] In an embodiment, the replacement sequence comprises or consists of an adenine (A) residue to correct the amino acid sequence to a glutamic acid (E) residue.

[1067] In an embodiment, to correct a mutation, e.g., at E6, e.g., E6V, in the HBB gene, the homology arms, e.g., the 5′ and 3′ homology arms, may each comprise about 1000 base pairs (bp) of sequence flanking the most distal gRNAs (e.g., 1100 bp of sequence on either side of the mutation). The 5′ homology arm is shown as bold sequence, codon 6 is shown as underlined sequence, the inserted base to correct the mutation at E6, e.g., E6V, is shown as boxed sequence, and the 3′ homology arm is shown as no emphasis sequence.

(Template Construct 1)

SEQ ID NO: 393

ATAGGAACTTGAATCAAGGAAATGATTTTAAAACGCAGTATTCTTAGTGG
ACTAGAGGAAAAAAATAATCTGAGCCAAGTAGAAGACCTTTTCCCCTCCT
ACCCCTACTTTCTAAGTCACAGAGGCTTTTTGTTCCCCCAGACACTCTTG
CAGATTAGTCCAGGCAGAAACAGTTAGATGTCCCCAGTTAACCTCCTATT
TGACACCACTGATTACCCCATTGATAGTCACACTTTGGGTTGTAAGTGAC
TTTTTATTTATTTGTATTTTTGACTGCATTAAGAGGTCTCTAGTTTTTTA
TCTCTTGTTTCCCAAAACCTAATAAGTAACTAATGCACAGAGCACATTGA
TTTGTATTTATTCTATTTTTAGACATAATTTATTAGCATGCATGAGCAAA
TTAAGAAAAACAACAACAAATGAATGCATATATATGTATATGTATGTGTG
TATATATACACACATATATATATATATTTTTTCTTTTCTTACCAGAAGGT
TTTAATCCAAATAAGGAGAAGATATGCTTAGAACCGAGGTAGAGTTTTCA
TCCATTCTGTCCTGTAAGTATTTTGCATATTCTGGAGACGCAGGAAGAGA
TCCATCTACATATCCCAAAGCTGAATTATGGTAGACAAAACTCTTCCACT
TTTAGTGCATCAACTTCTTATTTGTGTAATAAGAAAATTGGGAAAACGAT
CTTCAATATGCTTACCAAGCTGTGATTCCAAATATTACGTAAATACACTT
GCAAAGGAGGATGTTTTTAGTAGCAATTTGTACTGATGGTATGGGGCCAA
GAGATATATCTTAGAGGGAGGGCTGAGGGTTTGAAGTCCAACTCCTAAGC
CAGTGCCAGAAGAGCCAAGGACAGGTACGGCTGTCATCACTTAGACCTCA
CCCTGTGGAGCCACACCCTAGGGTTGGCCAATCTACTCCCAGGAGCAGGG
AGGGCAGGAGCCAGGGCTGGGCATAAAAGTCAGGGCAGAGCCATCTATTG
CTTACATTTGCTTCTGACACAACTGTGTTCACTAGCAACCTCAAACAGAC
ACCATGGTGCATCTGACTCCTG [symbol] GGAGAAGTCTGCCGTTACTGCCCTGTG
GGGCAAGGTGAACGTGGATGAAGTTGGTGGTGAGGCCCTGGGCAGGTTGG
TATCAAGGTTACAAGACAGGTTTAAGGAGACCAATAGAAACTGGGCATGT
GGAGACAGAGAAGACTCTTGGGTTTCTGATAGGCACTGACTCTCTCTGCC
TATTGGTCTATTTTCCCACCCTTAGGCTGCTGGTGGTCTACCCTTGGACC
CAGAGGTTCTTTGAGTCCTTTGGGGATCTGTCCACTCCTGATGCTGTTAT
GGGCAACCCTAAGGTGAAGGCTCATGGCAAGAAAGTGCTCGGTGCCTTTA
GTGATGGCCTGGCTCACCTGGACAACCTCAAGGGCACCTTTGCCACACTG
AGTGAGCTGCACTGTGACAAGCTGCACGTGGATCCTGAGAACTTCAGGGT
GAGTCTATGGGACGCTTGATGTTTTCTTTCCCCTTCTTTTCTATGGTTAA
GTTCATGTCATAGGAAGGGGATAAGTAACAGGGTACAGTTTAGAATGGGA
AACAGACGAATGATTGCATCAGTGTGGAAGTCTCAGGATCGTTTTAGTTT
CTTTTATTTGCTGTTCATAACAATTGTTTTCTTTTGTTTAATTCTTGCTT
TCTTTTTTTTTCTTCTCCGCAATTTTTACTATTATACTTAATGCCTTAAC
ATTGTGTATAACAAAAGGAAATATCTCTGAGATACATTAAGTAACTTAAA
AAAAAACTTTACACAGTCTGCCTAGTACATTACTATTTGGAATATATGTG
TGCTTATTTGCATATTCATAATCTCCCTACTTTATTTTCTTTTATTTTTA
ATTGATACATAATCATTATACATATTTATGGGTTAAAGTGTAATGTTTTA
ATATGTGTACACATATTGACCAAATCAGGGTAATTTTGCATTTGTAATTT
TAAAAAATGCTTTCTTCTTTTAATATACTTTTTTGTTTATCTTATTTCTA
ATACTTTCCCTAATCTCTTTCTTTCAGGGCAATAATGATACAATGTATCA
TGCCTCTTTGCACCATTCTAAAGAATAACAGTGATAATTTCTGGGTTAAG
GCAATAGCAATATCTCTGCATATAAATATTTCTGCATATAAATTGTAACT
G

[1068] As described below in Table 650, shorter homology arms, e.g., 5′ and/or 3′ homology arms may be used.

[1069] It is contemplated herein that one or both homology arms may be shortened to avoid including certain sequence repeat elements, e.g., Alu repeats, LINE elements. For example, a 5′ homology arm may be shortened to avoid a sequence repeat element. In another embodiment, a 3′ homology arm may be shortened to avoid a sequence repeat element. In an embodiment, both the 5′ and the 3′ homology arms may be shortened to avoid including certain sequence repeat elements.

[1070] It is contemplated herein that template nucleic acids for correcting a mutation may designed for use as a single-stranded oligonucleotide (ssODN). When using a ssODN, 5′ and 3′ homology arms may range up to about 200 base pairs (bp) in length, e.g., at least 25, 50, 75, 100, 125, 150, 175, or 200 bp in length. Longer homology arms are also contemplated for ssODNs as improvements in oligonucleotide synthesis continue to be made.

[1071] In an embodiment, an ssODN may be used to correct a mutation, e.g., E6V in the HBB gene. For example, the ssODN may include 50 bp 5′ and 3′ homology arms as shown below. The 5′ homology arm is shown as bold sequence, codon 6 is shown as underlined sequence, the inserted base to correct the E6V mutation is shown as boxed sequence, and the 3′ homology arm is shown as no emphasis sequence.

[chemical structure]

[1072] Silent Mutations in Donor Construct

[1073] It is contemplated herein that Cas9 could potentially cleave donor constructs either prior to or following homology directed repair (e.g., homologous recombination), resulting in a possible non-homologous-end-joining event and further DNA sequence mutation at the chromosomal locus of interest. Therefore, to avoid cleavage of the donor sequence before and/or after Cas9-mediated homology directed repair, alternate versions of the donor sequence may be used where silent mutations are introduced. These silent mutations may disrupt Cas9 binding and cleavage, but not disrupt the amino acid sequence of the repaired gene. For example, mutations may include those made to a donor sequence to repair the HBB gene, the mutant form of which can cause Sickle Cell Disease. If gRNA HBB-6 with the 20-base target sequence CGUUACUGCCCUGUGGGGCA (SEQ ID NO:400) is used to insert a donor sequence including

[chemical structure]

where the italic A is the base being corrected and the bracketed bases are those that match the guide RNA, the donor sequence may be changed to

[chemical structure]

where the lowercase a has been changed from a G (lower case g in SEQ ID NO:395) at that position so that codon 15 still codes for the amino acid Arginine but the PAM sequence AGG has been modified to AGA to reduce or eliminate Cas9 cleavage at that locus.

[1074] Table 650 below provides exemplary template nucleic acids. In an embodiment, the template nucleic acid includes the 5′ homology arm and the 3′ homology arm of a row from Table 650. In another embodiment, a 5′ homology arm from the first column can be combined with a 3′ homology arm from Table 650. In each embodiment, a combination of the 5′ and 3′ homology arms include a replacement sequence, e.g., an adenine (A) residue.

TABLE 650

| | Replacement | |
|---|---|---|
| | Sequence: G, | |
| | A, C or T, or a | |
| | cDNA | |
| | sequence | |
| | described | |
| | herein, | |
| 5′ homology | optionally a | |
| arm (the number | promoter, | |
| of nucleotides | further | |
| from SEQ ID NO: 391 | optionally a | 3′ homology arm (the number of |
| 5′H, beginning at the | polyA signal, | nucleotides from SEQ ID |
| 3′ end of SEQ | as described | NO: 392 3′H, beginning at the 5′ |
| ID NO: 391 5′H) | herein. | end of SEQ ID NO: 392 3′H) |
| 10 or more | | 10 or more |
| 20 or more | | 20 or more |
| 50 or more | | 50 or more |
| 100 or more | | 100 or more |
| 150 or more | | 150 or more |
| 200 or more | | 200 or more |
| 250 or more | | 250 or more |
| 300 or more | | 300 or more |
| 350 or more | | 350 or more |
| 400 or more | | 400 or more |
| 450 or more | | 450 or more |
| 500 or more | | 500 or more |
| 550 or more | | 550 or more |
| 600 or more | | 600 or more |
| 650 or more | | 650 or more |
| 700 or more | | 700 or more |
| 750 or more | | 750 or more |
| 800 or more | | 800 or more |
| 850 or more | | 850 or more |
| 900 or more | | 900 or more |
| 1000 or more | | 1000 or more |
| 1100 or more | | 1100 or more |
| 1200 or more | | 1200 or more |
| 1300 or more | | 1300 or more |
| 1400 or more | | 1400 or more |
| 1500 or more | | 1500 or more |
| 1600 or more | | 1600 or more |
| 1700 or more | | 1700 or more |
| 1800 or more | | 1800 or more |
| 1900 or more | | 1900 or more |
| 1200 or more | | 1200 or more |
| At least 50 but not | | At least 50 but not long enough |
| long enough to | | to include a repeated element. |
| include a repeated | | |
| element. | | |
| At least 100 but not | | At least 100 but not long enough |
| long enough to | | to include a repeated element. |
| include a repeated | | |
| element. | | |
| At least 150 but not | | At least 150 but not long enough |
| long enough to | | to include a repeated element. |
| include a repeated | | |
| element. | | |
| 5 to 100 nucleotides | | 5 to 100 nucleotides |
| 10 to 150 nucleotides | | 10 to 150 nucleotides |
| 20 to 150 nucleotides | | 20 to 150 nucleotides |

Template Construct No. 1
Template Construct No. 2

[1075] V.4 Single-Strand Annealing

[1076] Single strand annealing (SSA) is another DNA repair process that repairs a double-strand break between two repeat sequences present in a target nucleic acid. Repeat sequences utilized by the SSA pathway are generally greater than 30 nucleotides in length. Resection at the break ends occurs to reveal repeat sequences on both strands of the target nucleic acid. After resection, single strand overhangs containing the repeat sequences are coated with RPA protein to prevent the repeats sequences from inappropriate annealing, e.g., to themselves. RAD52 binds to and each of the repeat sequences on the overhangs and aligns the sequences to enable the annealing of the complementary repeat sequences. After annealing, the single-strand flaps of the overhangs are cleaved. New DNA synthesis fills in any gaps, and ligation restores the DNA duplex. As a result of the processing, the DNA sequence between the two repeats is deleted. The length of the deletion can depend on many factors including the location of the two repeats utilized, and the pathway or processivity of the resection.

[1077] In contrast to HDR pathways, SSA does not require a template nucleic acid to alter or correct a target nucleic acid sequence. Instead, the complementary repeat sequence is utilized.

[1078] V.5 Other DNA Repair Pathways

[1079] SSBR (Single Strand Break Repair)

[1080] Single-stranded breaks (SSB) in the genome are repaired by the SSBR pathway, which is a distinct mechanism from the DSB repair mechanisms discussed above. The SSBR pathway has four major stages: SSB detection, DNA end processing, DNA gap filling, and DNA ligation. A more detailed explanation is given in Caldecott, Nature Reviews Genetics 9, 619-631 (August 2008), and a summary is given here.

[1081] In the first stage, when a SSB forms, PARP1 and/or PARP2 recognize the break and recruit repair machinery. The binding and activity of PARP1 at DNA breaks is transient and it seems to accelerate SSBr by promoting the focal accumulation or stability of SSBr protein complexes at the lesion. Arguably the most important of these SSBr proteins is XRCC1, which functions as a molecular scaffold that interacts with, stabilizes, and stimulates multiple enzymatic components of the SSBr process including the protein responsible for cleaning the DNA 3′ and 5′ ends. For instance, XRCC1 interacts with several proteins (DNA polymerase beta, PNK, and three nucleases, APE1, APTX, and APLF) that promote end processing. APE1 has endonuclease activity. APLF exhibits endonuclease and 3′ to 5′ exonuclease activities. APTX has endonuclease and 3′ to 5′ exonuclease activity.

[1082] This end processing is an important stage of SSBR since the 3′- and/or 5′-termini of most, if not all, SSBs are ‘damaged’. End processing generally involves restoring a damaged 3′-end to a hydroxylated state and and/or a damaged 5′ end to a phosphate moiety, so that the ends become ligation-competent. Enzymes that can process damaged 3′ termini include PNKP, APE1, and TDP1. Enzymes that can process damaged 5′ termini include PNKP, DNA polymerase beta, and APTX. LIG3 (DNA ligase III) can also participate in end processing. Once the ends are cleaned, gap filling can occur.

[1083] At the DNA gap filling stage, the proteins typically present are PARP1, DNA polymerase beta, XRCC1, FEN1 (flap endonculease 1), DNA polymerase delta/epsilon, PCNA, and LIG1. There are two ways of gap filling, the short patch repair and the long patch repair. Short patch repair involves the insertion of a single nucleotide that is missing. At some SSBs, “gap filling” might continue displacing two or more nucleotides (displacement of up to 12 bases have been reported). FEN1 is an endonuclease that removes the displaced 5″-residues. Multiple DNA polymerases, including Pol β, are involved in the repair of SSBs, with the choice of DNA polymerase influenced by the source and type of SSB.

[1084] In the fourth stage, a DNA ligase such as LIG1 (Ligase I) or LIG3 (Ligase III) catalyzes joining of the ends. Short patch repair uses Ligase III and long patch repair uses Ligase I.

[1085] Sometimes, SSBR is replication-coupled. This pathway can involve one or more of CtIP, MRN, ERCC1, and FEN1. Additional factors that may promote SSBR include: aPARP, PARP1, PARP2, PARG, XRCC1, DNA polymerase b, DNA polymerase d, DNA polymerase e, PCNA, LIG1, PNK, PNKP, APE1, APTX, APLF, TDP1, LIG3, FEN1, CtIP, MRN, and ERCC1.

[1086] MMR (Mismatch Repair)

[1087] Cells contain three excision repair pathways: MMR, BER, and NER. The excision repair pathways hace a common feature in that they typically recognize a lesion on one strand of the DNA, then exo/endonucleaseases remove the lesion and leave a 1-30 nucleotide gap that is sub-sequentially filled in by DNA polymerase and finally sealed with ligase. A more complete picture is given in Li, Cell Research (2008) 18:85-98, and a summary is provided here.

[1088] Mismatch repair (MMR) operates on mispaired DNA bases.

[1089] The MSH2/6 or MSH2/3 complexes both have ATPases activity that plays an important role in mismatch recognition and the initiation of repair. MSH2/6 preferentially recognizes base-base mismatches and identifies mispairs of 1 or 2 nucleotides, while MSH2/3 preferentially recognizes larger ID mispairs.

[1090] hMLH1 heterodimerizes with hPMS2 to form hMutLα which possesses an ATPase activity and is important for multiple steps of MMR. It possesses a PCNA/replication factor C (RFC)-dependent endonuclease activity which plays an important role in 3′ nick-directed MMR involving EXO1. (EXO1 is a participant in both HR and MMR.) It regulates termination of mismatch-provoked excision. Ligase I is the relevant ligase for this pathway. Additional factors that may promote MMR include: EXO1, MSH2, MSH3, MSH6, MLH1, PMS2, MLH3, DNA Pol d, RPA, HMGB1, RFC, and DNA ligase I.

[1091] Base Excision Repair (BER)

[1092] The base excision repair (BER) pathway is active throughout the cell cycle; it is responsible primarily for removing small, non-helix-distorting base lesions from the genome. In contrast, the related Nucleotide Excision Repair pathway (discussed in the next section) repairs bulky helix-distorting lesions. A more detailed explanation is given in Caldecott, Nature Reviews Genetics 9, 619-631 (August 2008), and a summary is given here.

[1093] Upon DNA base damage, base excision repair (BER) is initiated and the process can be simplified into five major steps: (a) removal of the damaged DNA base; (b) incision of the subsequent a basic site; (c) clean-up of the DNA ends; (d) insertion of the correct nucleotide into the repair gap; and (e) ligation of the remaining nick in the DNA backbone. These last steps are similar to the SSBR.

[1094] In the first step, a damage-specific DNA glycosylase excises the damaged base through cleavage of the N-glycosidic bond linking the base to the sugar phosphate backbone. Then AP endonuclease-1 (APE1) or bifunctional DNA glycosylases with an associated lyase activity incised the phosphodiester backbone to create a DNA single strand break (SSB). The third step of BER involves cleaning-up of the DNA ends. The fourth step in BER is conducted by Pol β that adds a new complementary nucleotide into the repair gap and in the final step XRCC1/Ligase III seals the remaining nick in the DNA backbone. This completes the short-patch BER pathway in which the majority (˜80%) of damaged DNA bases are repaired. However, if the 5′-ends in step 3 are resistant to end processing activity, following one nucleotide insertion by Pol β there is then a polymerase switch to the replicative DNA polymerases, Pol δ/ε, which then add ˜2-8 more nucleotides into the DNA repair gap. This creates a 5′-flap structure, which is recognized and excised by flap endonuclease-1 (FEN-1) in association with the processivity factor proliferating cell nuclear antigen (PCNA). DNA ligase I then seals the remaining nick in the DNA backbone and completes long-patch BER. Additional factors that may promote the BER pathway include: DNA glycosylase, APE1, Polb, Pold, Pole, XRCC1, Ligase III, FEN-1, PCNA, RECQL4, WRN, MYH, PNKP, and APTX.

[1095] Nucleotide Excision Repair (NER)

[1096] Nucleotide excision repair (NER) is an important excision mechanism that removes bulky helix-distorting lesions from DNA. Additional details about NER are given in Marteijn et al., Nature Reviews Molecular Cell Biology 15,465-481 (2014), and a summary is given here. NER a broad pathway encompassing two smaller pathways: global genomic NER (GG-NER) and transcription coupled repair NER (TC-NER). GG-NER and TC-NER use different factors for recognizing DNA damage. However, they utilize the same machinery for lesion incision, repair, and ligation.

[1097] Once damage is recognized, the cell removes a short single-stranded DNA segment that contains the lesion. Endonucleases XPF/ERCC1 and XPG (encoded by ERCCS) remove the lesion by cutting the damaged strand on either side of the lesion, resulting in a single-strand gap of 22-30 nucleotides. Next, the cell performs DNA gap filling synthesis and ligation. Involved in this process are: PCNA, RFC, DNA Pol δ, DNA Pol ε or DNA Pol δ, and DNA ligase I or XRCC1/Ligase III. Replicating cells tend to use DNA pol c and DNA ligase I, while non-replicating cells tend to use DNA Pol δ, DNA Pol κ, and the XRCC1/Ligase III complex to perform the ligation step.

[1098] NER can involve the following factors: XPA-G, POLH, XPF, ERCC1, XPA-G, and LIG1. Transcription-coupled NER (TC-NER) can involve the following factors: CSA, CSB, XPB, XPD, XPG, ERCC1, and TTDA. Additional factors that may promote the NER repair pathway include XPA-G, POLH, XPF, ERCC1, XPA-G, LIG1, CSA, CSB, XPA, XPB, XPC, XPD, XPF, XPG, TTDA, UVSSA, USP7, CETN2, RAD23B, UV-DDB, CAK subcomplex, RPA, and PCNA.

[1099] Interstrand Crosslink (ICL)

[1100] A dedicated pathway called the ICL repair pathway repairs interstrand crosslinks. Interstrand crosslinks, or covalent crosslinks between bases in different DNA strand, can occur during replication or transcription. ICL repair involves the coordination of multiple repair processes, in particular, nucleolytic activity, translesion synthesis (TLS), and HDR. Nucleases are recruited to excise the ICL on either side of the crosslinked bases, while TLS and HDR are coordinated to repair the cut strands. ICL repair can involve the following factors: endonucleases, e.g., XPF and RAD51C, endonucleases such as RAD51, translesion polymerases, e.g., DNA polymerase zeta and Rev1), and the Fanconi anemia (FA) proteins, e.g., FancJ.

[1101] Other Pathways

[1102] Several other DNA repair pathways exist in mammals.

[1103] Translesion synthesis (TLS) is a pathway for repairing a single stranded break left after a defective replication event and involves translesion polymerases, e.g., DNA pol□ and Rev1.

[1104] Error-free postreplication repair (PRR) is another pathway for repairing a single stranded break left after a defective replication event.

[1105] V.6 Examples of gRNAs in Genome Editing Methods

[1106] gRNA molecules as described herein can be used with Cas9 molecules that generate a double strand break or a single strand break to alter the sequence of a target nucleic acid, e.g., a target position or target genetic signature. gRNA molecules useful in these methods are described below.

[1107] In an embodiment, the gRNA, e.g., a chimeric gRNA, is configured such that it comprises one or more of the following properties;

[1108] a) it can position, e.g., when targeting a Cas9 molecule that makes double strand breaks, a double strand break (i) within 50, 100, 150, 200, 250, 300, 350, 400, 450, or 500 nucleotides of a target position, or (ii) sufficiently close that the target position is within the region of end resection;

[1109] b) it has a targeting domain of at least 16 nucleotides, e.g., a targeting domain of (i) 16, (ii), 17, (iii) 18, (iv) 19, (v) 20, (vi) 21, (vii) 22, (viii) 23, (ix) 24, (x) 25, or (xi) 26 nucleotides; and

[1110] c)
[1111] (i) the proximal and tail domain, when taken together, comprise at least 15, 18, 20, 25, 30, 31, 35, 40, 45, 49, 50, or 53 nucleotides, e.g., at least 15, 18, 20, 25, 30, 31, 35, 40, 45, 49, 50, or 53 nucleotides from a naturally occurring S. pyogenes, S. thermophilus, S. aureus, or N. meningitidis tail and proximal domain, or a sequence that differs by no more than 1, 2, 3, 4, 5; 6, 7, 8, 9 or 10 nucleotides therefrom;
   [1112] (ii) there are at least 15, 18, 20, 25, 30, 31, 35, 40, 45, 49, 50, or 53 nucleotides 3′ to the last nucleotide of the second complementarity domain, e.g., at least 15, 18, 20, 25, 30, 31, 35, 40, 45, 49, 50, or 53 nucleotides from the corresponding sequence of a naturally occurring S. pyogenes, S. thermophilus, S. aureus, or N. meningitidis gRNA, or a sequence that differs by no more than 1, 2, 3, 4, 5; 6, 7, 8, 9 or 10 nucleotides therefrom;
[1113] (iii) there are at least 16, 19, 21, 26, 31, 32, 36, 41, 46, 50, 51, or 54 nucleotides 3′ to the last nucleotide of the second complementarity domain that is complementary to its corresponding nucleotide of the first complementarity domain, e.g., at least 16, 19, 21, 26, 31, 32, 36, 41, 46, 50, 51, or 54 nucleotides from the corresponding sequence of a naturally occurring S. pyogenes, S. thermophilus, S. aureus, or N. meningitidis gRNA, or a sequence that differs by no more than 1, 2, 3, 4, 5; 6, 7, 8, 9 or 10 nucleotides therefrom;
[1114] (iv) the tail domain is at least 10, 15, 20, 25, 30, 35 or 40 nucleotides in length, e.g., it comprises at least 10, 15, 20, 25, 30, 35 or 40 nucleotides from a naturally occurring S. pyogenes, S. thermophilus, S. aureus, or N. meningitidis tail domain, or a sequence that differs by no more than 1, 2, 3, 4, 5; 6, 7, 8, 9 or 10 nucleotides therefrom; or
[1115] (v) the tail domain comprises 15, 20, 25, 30, 35, 40 nucleotides or all of the corresponding portions of a naturally occurring tail domain, e.g., a naturally occurring S. pyogenes, S. thermophilus, S. aureus, or N. meningitidis tail domain.

[1116] In an embodiment, the gRNA is configured such that it comprises properties: a and b(i).

[1117] In an embodiment, the gRNA is configured such that it comprises properties: a and b(ii).

[1118] In an embodiment, the gRNA is configured such that it comprises properties: a and b(iii).

[1119] In an embodiment, the gRNA is configured such that it comprises properties: a and b(iv).

[1120] In an embodiment, the gRNA is configured such that it comprises properties: a and b(v).

[1121] In an embodiment, the gRNA is configured such that it comprises properties: a and b(vi).

[1122] In an embodiment, the gRNA is configured such that it comprises properties: a and b(vii).

[1123] In an embodiment, the gRNA is configured such that it comprises properties: a and b(viii).

[1124] In an embodiment, the gRNA is configured such that it comprises properties: a and b(ix).

[1125] In an embodiment, the gRNA is configured such that it comprises properties: a and b(x).

[1126] In an embodiment, the gRNA is configured such that it comprises properties: a and b(xi).

[1127] In an embodiment, the gRNA is configured such that it comprises properties: a and c.

[1128] In an embodiment, the gRNA is configured such that in comprises properties: a, b, and c.

[1129] In an embodiment, the gRNA is configured such that in comprises properties: a(i), b(i), and

[1130] In an embodiment, the gRNA is configured such that in comprises properties: a(i), b(i), and c(ii).

[1131] In an embodiment, the gRNA is configured such that in comprises properties: a(i), b(ii), and c(i).

[1132] In an embodiment, the gRNA is configured such that in comprises properties: a(i), b(ii), and c(ii).

[1133] In an embodiment, the gRNA is configured such that in comprises properties: a(i), b(iii), and c(i).

[1134] In an embodiment, the gRNA is configured such that in comprises properties: a(i), b(iii), and c(ii).

[1135] In an embodiment, the gRNA is configured such that in comprises properties: a(i), b(iv), and c(i).

[1136] In an embodiment, the gRNA is configured such that in comprises properties: a(i), b(iv), and c(ii).

[1137] In an embodiment, the gRNA is configured such that in comprises properties: a(i), b(v), and c(i).

[1138] In an embodiment, the gRNA is configured such that in comprises properties: a(i), b(v), and c(ii).

[1139] In an embodiment, the gRNA is configured such that in comprises properties: a(i), b(vi), and c(i).

[1140] In an embodiment, the gRNA is configured such that in comprises properties: a(i), b(vi), and c(ii).

[1141] In an embodiment, the gRNA is configured such that in comprises properties: a(i), b(vii), and c(i).

[1142] In an embodiment, the gRNA is configured such that in comprises properties: a(i), b(vii), and c(ii).

[1143] In an embodiment, the gRNA is configured such that in comprises properties: a(i), b(viii), and c(i).

[1144] In an embodiment, the gRNA is configured such that in comprises properties: a(i), b(viii), and c(ii).

[1145] In an embodiment, the gRNA is configured such that in comprises properties: a(i), b(ix), and c(i).

[1146] In an embodiment, the gRNA is configured such that in comprises properties: a(i), b(ix), and c(ii).

[1147] In an embodiment, the gRNA is configured such that in comprises properties: a(i), b(x), and c(i).

[1148] In an embodiment, the gRNA is configured such that in comprises properties: a(i), b(x), and c(ii).

[1149] In an embodiment, the gRNA is configured such that in comprises properties: a(i), b(xi), and c(i).

[1150] In an embodiment, the gRNA is configured such that in comprises properties: a(i), b(xi), and c(ii).

[1151] In an embodiment, the gRNA, e.g., a chimeric gRNA, is configured such that it comprises one or more of the following properties;

[1152] a) one or both of the gRNAs can position, e.g., when targeting a Cas9 molecule that makes single strand breaks, a single strand break within (i) 50, 100, 150, 200, 250, 300, 350, 400, 450, or 500 nucleotides of a target position, or (ii) sufficiently close that the target position is within the region of end resection;

[1153] b) one or both have a targeting domain of at least 16 nucleotides, e.g., a targeting domain of (i) 16, (ii), 17, (iii) 18, (iv) 19, (v) 20, (vi) 21, (vii) 22, (viii) 23, (ix) 24, (x) 25, or (xi) 26 nucleotides; and

[1154] c)
[1155] (i) the proximal and tail domain, when taken together, comprise at least 15, 18, 20, 25, 30, 31, 35, 40, 45, 49, 50, or 53 nucleotides, e.g., at least 15, 18, 20, 25, 30, 31, 35, 40, 45, 49, 50, or 53 nucleotides from a naturally occurring S. pyogenes, S. thermophilus, S. aureus, or N. meningitidis tail and proximal domain, or a sequence that differs by no more than 1, 2, 3, 4, 5; 6, 7, 8, 9 or 10 nucleotides therefrom;
[1156] (ii) there are at least 15, 18, 20, 25, 30, 31, 35, 40, 45, 49, 50, or 53 nucleotides 3′ to the last nucleotide of the second complementarity domain, e.g., at least 15, 18, 20, 25, 30, 31, 35, 40, 45, 49, 50, or 53 nucleotides from the corresponding sequence of a naturally occurring S. pyogenes, S. thermophilus, S. aureus, or N. meningitidis gRNA, or a sequence that differs by no more than 1, 2, 3, 4, 5; 6, 7, 8, 9 or 10 nucleotides therefrom;
[1157] (iii) there are at least 16, 19, 21, 26, 31, 32, 36, 41, 46, 50, 51, or 54 nucleotides 3′ to the last nucleotide of the second complementarity domain that is complementary to its corresponding nucleotide of the first complementarity domain, e.g., at least 16, 19, 21, 26, 31, 32, 36, 41, 46, 50, 51, or 54 nucleotides from the corresponding sequence of a naturally occurring S. pyogenes, S. thermophilus, S. aureus, or N. meningitidis gRNA, or a sequence that differs by no more than 1, 2, 3, 4, 5; 6, 7, 8, 9 or 10 nucleotides therefrom;
[1158] (iv) the tail domain is at least 10, 15, 20, 25, 30, 35 or 40 nucleotides in length, e.g., it comprises at least 10, 15, 20, 25, 30, 35 or 40 nucleotides from a naturally occurring S. pyogenes, S. thermophilus, S. aureus, or N. meningitidis tail domain, or a sequence that differs by no more than 1, 2, 3, 4, 5; 6, 7, 8, 9 or 10 nucleotides therefrom; or
[1159] (v) the tail domain comprises 15, 20, 25, 30, 35, 40 nucleotides or all of the corresponding portions of a naturally occurring tail domain, e.g., a naturally occurring S. pyogenes, S. thermophilus, S. aureus, or N. meningitidis tail domain.

[1160] In an embodiment, the gRNA is configured such that it comprises properties: a and b(i).

[1161] In an embodiment, the gRNA is configured such that it comprises properties: a and b(ii).

[1162] In an embodiment, the gRNA is configured such that it comprises properties: a and b(iii).

[1163] In an embodiment, the gRNA is configured such that it comprises properties: a and b(iv).

[1164] In an embodiment, the gRNA is configured such that it comprises properties: a and b(v).

[1165] In an embodiment, the gRNA is configured such that it comprises properties: a and b(vi).

[1166] In an embodiment, the gRNA is configured such that it comprises properties: a and b(vii).

[1167] In an embodiment, the gRNA is configured such that it comprises properties: a and b(viii).

[1168] In an embodiment, the gRNA is configured such that it comprises properties: a and b(ix).

[1169] In an embodiment, the gRNA is configured such that it comprises properties: a and b(x).

[1170] In an embodiment, the gRNA is configured such that it comprises properties: a and b(xi).

[1171] In an embodiment, the gRNA is configured such that it comprises properties: a and c.

[1172] In an embodiment, the gRNA is configured such that in comprises properties: a, b, and c.

[1173] In an embodiment, the gRNA is configured such that in comprises properties: a(i), b(i), and

[1174] In an embodiment, the gRNA is configured such that in comprises properties: a(i), b(i), and c(ii).

[1175] In an embodiment, the gRNA is configured such that in comprises properties: a(i), b(ii), and c(i).

[1176] In an embodiment, the gRNA is configured such that in comprises properties: a(i), b(ii), and c(ii).

[1177] In an embodiment, the gRNA is configured such that in comprises properties: a(i), b(iii), and c(i).

[1178] In an embodiment, the gRNA is configured such that in comprises properties: a(i), b(iii), and c(ii).

[1179] In an embodiment, the gRNA is configured such that in comprises properties: a(i), b(iv), and c(i).

[1180] In an embodiment, the gRNA is configured such that in comprises properties: a(i), b(iv), and c(ii).

[1181] In an embodiment, the gRNA is configured such that in comprises properties: a(i), b(v), and c(i).

[1182] In an embodiment, the gRNA is configured such that in comprises properties: a(i), b(v), and c(ii).

[1183] In an embodiment, the gRNA is configured such that in comprises properties: a(i), b(vi), and c(i).

[1184] In an embodiment, the gRNA is configured such that in comprises properties: a(i), b(vi), and c(ii).

[1185] In an embodiment, the gRNA is configured such that in comprises properties: a(i), b(vii), and c(i).

[1186] In an embodiment, the gRNA is configured such that in comprises properties: a(i), b(vii), and c(ii).

[1187] In an embodiment, the gRNA is configured such that in comprises properties: a(i), b(viii), and c(i).

[1188] In an embodiment, the gRNA is configured such that in comprises properties: a(i), b(viii), and c(ii).

[1189] In an embodiment, the gRNA is configured such that in comprises properties: a(i), b(ix), and c(i).

[1190] In an embodiment, the gRNA is configured such that in comprises properties: a(i), b(ix), and c(ii).

[1191] In an embodiment, the gRNA is configured such that in comprises properties: a(i), b(x), and c(i).

[1192] In an embodiment, the gRNA is configured such that in comprises properties: a(i), b(x), and c(ii).

[1193] In an embodiment, the gRNA is configured such that in comprises properties: a(i), b(xi), and c(i).

[1194] In an embodiment, the gRNA is configured such that in comprises properties: a(i), b(xi), and c(ii).

[1195] In an embodiment, the gRNA is used with a Cas9 nickase molecule having HNH activity, e.g., a Cas9 molecule having the RuvC activity inactivated, e.g., a Cas9 molecule having a mutation at D10, e.g., the D10A mutation.

[1196] In an embodiment, the gRNA is used with a Cas9 nickase molecule having RuvC activity, e.g., a Cas9 molecule having the HNH activity inactivated, e.g., a Cas9 molecule having a mutation at H840, e.g., a H840A or a mutation at N863, e.g., N863A.

[1197] In an embodiment, a pair of gRNAs, e.g., a pair of chimeric gRNAs, comprising a first and a second gRNA, is configured such that they comprises one or more of the following properties;

[1198] a) one or both of the gRNAs can position, e.g., when targeting a Cas9 molecule that makes single strand breaks, a single strand break within (i) 50, 100, 150, 200, 250, 300, 350, 400, 450, or 500 nucleotides of a target position, or (ii) sufficiently close that the target position is within the region of end resection;

[1199] b) one or both have a targeting domain of at least 16 nucleotides, e.g., a targeting domain of (i) 16, (ii), 17, (iii) 18, (iv) 19, (v) 20, (vi) 21, (vii) 22, (viii) 23, (ix) 24, (x) 25, or (xi) 26 nucleotides;

[1200] c) for one or both:
[1201] (i) the proximal and tail domain, when taken together, comprise at least 15, 18, 20, 25, 30, 31, 35, 40, 45, 49, 50, or 53 nucleotides, e.g., at least 15, 18, 20, 25, 30, 31, 35, 40, 45, 49, 50, or 53 nucleotides from a naturally occurring S. pyogenes, S. thermophilus, S. aureus, or N. meningitidis tail and proximal domain, or a sequence that differs by no more than 1, 2, 3, 4, 5; 6, 7, 8, 9 or 10 nucleotides therefrom;
[1202] (ii) there are at least 15, 18, 20, 25, 30, 31, 35, 40, 45, 49, 50, or 53 nucleotides 3′ to the last nucleotide of the second complementarity domain, e.g., at least 15, 18, 20, 25, 30, 31, 35, 40, 45, 49, 50, or 53 nucleotides from the corresponding sequence of a naturally occurring S. pyogenes, S. thermophilus, S. aureus, or N. meningitidis gRNA, or a sequence that differs by no more than 1, 2, 3, 4, 5; 6, 7, 8, 9 or 10 nucleotides therefrom;
[1203] (iii) there are at least 16, 19, 21, 26, 31, 32, 36, 41, 46, 50, 51, or 54 nucleotides 3′ to the last nucleotide of the second complementarity domain that is complementary to its corresponding nucleotide of the first complementarity domain, e.g., at least 16, 19, 21, 26, 31, 32, 36, 41, 46, 50, 51, or 54 nucleotides from the corresponding sequence of a naturally occurring S. pyogenes, S. thermophilus, S. aureus, or N. meningitidis gRNA, or a sequence that differs by no more than 1, 2, 3, 4, 5; 6, 7, 8, 9 or 10 nucleotides therefrom;
[1204] (iv) the tail domain is at least 10, 15, 20, 25, 30, 35 or 40 nucleotides in length, e.g., it comprises at least 10, 15, 20, 25, 30, 35 or 40 nucleotides from a naturally occurring S. pyogenes, S. thermophilus, S. aureus, or N. meningitidis tail domain; or, or a sequence that differs by no more than 1, 2, 3, 4, 5; 6, 7, 8, 9 or 10 nucleotides therefrom; or
[1205] (v) the tail domain comprises 15, 20, 25, 30, 35, 40 nucleotides or all of the corresponding portions of a naturally occurring tail domain, e.g., a naturally occurring S. pyogenes, S. thermophilus, S. aureus, or N. meningitidis tail domain;

[1206] d) the gRNAs are configured such that, when hybridized to target nucleic acid, they are separated by 0-50, 0-100, 0-200, at least 10, at least 20, at least 30 or at least 50 nucleotides;

[1207] e) the breaks made by the first gRNA and second gRNA are on different strands; and

[1208] f) the PAMs are facing outwards.

[1209] In an embodiment, one or both of the gRNAs is configured such that it comprises properties: a and b(i).

[1210] In an embodiment, one or both of the gRNAs is configured such that it comprises properties: a and b(ii).

[1211] In an embodiment, one or both of the gRNAs is configured such that it comprises properties: a and b(iii).

[1212] In an embodiment, one or both of the gRNAs is configured such that it comprises properties: a and b(iv).

[1213] In an embodiment, one or both of the gRNAs is configured such that it comprises properties: a and b(v).

[1214] In an embodiment, one or both of the gRNAs is configured such that it comprises properties: a and b(vi).

[1215] In an embodiment, one or both of the gRNAs is configured such that it comprises properties: a and b(vii).

[1216] In an embodiment, one or both of the gRNAs is configured such that it comprises properties: a and b(viii).

[1217] In an embodiment, one or both of the gRNAs is configured such that it comprises properties: a and b(ix).

[1218] In an embodiment, one or both of the gRNAs is configured such that it comprises properties: a and b(x).

[1219] In an embodiment, one or both of the gRNAs is configured such that it comprises properties: a and b(xi).

[1220] In an embodiment, one or both of the gRNAs configured such that it comprises properties: a and c.

[1221] In an embodiment, one or both of the gRNAs is configured such that it comprises properties: a, b, and c.

[1222] In an embodiment, one or both of the gRNAs is configured such that it comprises properties: a(i), b(i), and c(i).

[1223] In an embodiment, one or both of the gRNAs is configured such that it comprises properties: a(i), b(i), and c(ii).

[1224] In an embodiment, one or both of the gRNAs is configured such that it comprises properties: a(i), b(i), c, and d.

[1225] In an embodiment, one or both of the gRNAs is configured such that it comprises properties: a(i), b(i), c, and e.

[1226] In an embodiment, one or both of the gRNAs is configured such that it comprises properties: a(i), b(i), c, d, and e.

[1227] In an embodiment, one or both of the gRNAs is configured such that it comprises properties: a(i), b(ii), and c(i).

[1228] In an embodiment, one or both of the gRNAs is configured such that it comprises properties: a(i), b(ii), and c(ii).

[1229] In an embodiment, one or both of the gRNAs is configured such that it comprises properties: a(i), b(ii), c, and d.

[1230] In an embodiment, one or both of the gRNAs is configured such that it comprises properties: a(i), b(ii), c, and e.

[1231] In an embodiment, one or both of the gRNAs is configured such that it comprises properties: a(i), b(ii), c, d, and e.

[1232] In an embodiment, one or both of the gRNAs is configured such that it comprises properties: a(i), b(iii), and c(i).

[1233] In an embodiment, one or both of the gRNAs is configured such that it comprises properties: a(i), b(iii), and c(ii).

[1234] In an embodiment, one or both of the gRNAs is configured such that it comprises properties: a(i), b(iii), c, and d.

[1235] In an embodiment, one or both of the gRNAs is configured such that it comprises properties: a(i), b(iii), c, and e.

[1236] In an embodiment, one or both of the gRNAs is configured such that it comprises properties: a(i), b(iii), c, d, and e.

[1237] In an embodiment, one or both of the gRNAs is configured such that it comprises properties: a(i), b(iv), and c(i).

[1238] In an embodiment, one or both of the gRNAs is configured such that it comprises properties: a(i), b(iv), and c(ii).

[1239] In an embodiment, one or both of the gRNAs is configured such that it comprises properties: a(i), b(iv), c, and d.

[1240] In an embodiment, one or both of the gRNAs is configured such that it comprises properties: a(i), b(iv), c, and e.

[1241] In an embodiment, one or both of the gRNAs is configured such that it comprises properties: a(i), b(iv), c, d, and e.

[1242] In an embodiment, one or both of the gRNAs is configured such that it comprises properties: a(i), b(v), and c(i).

[1243] In an embodiment, one or both of the gRNAs is configured such that it comprises properties: a(i), b(v), and c(ii).

[1244] In an embodiment, one or both of the gRNAs is configured such that it comprises properties: a(i), b(v), c, and d.

[1245] In an embodiment, one or both of the gRNAs is configured such that it comprises properties: a(i), b(v), c, and e.

[1246] In an embodiment, one or both of the gRNAs is configured such that it comprises properties: a(i), b(v), c, d, and e.

[1247] In an embodiment, one or both of the gRNAs is configured such that it comprises properties: a(i), b(vi), and c(i).

[1248] In an embodiment, one or both of the gRNAs is configured such that it comprises properties: a(i), b(vi), and c(ii).

[1249] In an embodiment, one or both of the gRNAs is configured such that it comprises properties: a(i), b(vi), c, and d.

[1250] In an embodiment, one or both of the gRNAs is configured such that it comprises properties: a(i), b(vi), c, and e.

[1251] In an embodiment, one or both of the gRNAs is configured such that it comprises properties: a(i), b(vi), c, d, and e.

[1252] In an embodiment, one or both of the gRNAs is configured such that it comprises properties: a(i), b(vii), and c(i).

[1253] In an embodiment, one or both of the gRNAs is configured such that it comprises properties: a(i), b(vii), and c(ii).

[1254] In an embodiment, one or both of the gRNAs is configured such that it comprises properties: a(i), b(vii), c, and d.

[1255] In an embodiment, one or both of the gRNAs is configured such that it comprises properties: a(i), b(vii), c, and e.

[1256] In an embodiment, one or both of the gRNAs is configured such that it comprises properties: a(i), b(vii), c, d, and e.

[1257] In an embodiment, one or both of the gRNAs is configured such that it comprises properties: a(i), b(viii), and c(i).

[1258] In an embodiment, one or both of the gRNAs is configured such that it comprises properties: a(i), b(viii), and c(ii).

[1259] In an embodiment, one or both of the gRNAs is configured such that it comprises properties: a(i), b(viii), c, and d.

[1260] In an embodiment, one or both of the gRNAs is configured such that it comprises properties: a(i), b(viii), c, and e.

[1261] In an embodiment, one or both of the gRNAs is configured such that it comprises properties: a(i), b(viii), c, d, and e.

[1262] In an embodiment, one or both of the gRNAs is configured such that it comprises properties: a(i), b(ix), and c(i).

[1263] In an embodiment, one or both of the gRNAs is configured such that it comprises properties: a(i), b(ix), and c(ii).

[1264] In an embodiment, one or both of the gRNAs is configured such that it comprises properties: a(i), b(ix), c, and d.

[1265] In an embodiment, one or both of the gRNAs is configured such that it comprises properties: a(i), b(ix), c, and e.

[1266] In an embodiment, one or both of the gRNAs is configured such that it comprises properties: a(i), b(ix), c, d, and e.

[1267] In an embodiment, one or both of the gRNAs is configured such that it comprises properties: a(i), b(x), and c(i).

[1268] In an embodiment, one or both of the gRNAs is configured such that it comprises properties: a(i), b(x), and c(ii).

[1269] In an embodiment, one or both of the gRNAs is configured such that it comprises properties: a(i), b(x), c, and d.

[1270] In an embodiment, one or both of the gRNAs is configured such that it comprises properties: a(i), b(x), c, and e.

[1271] In an embodiment, one or both of the gRNAs is configured such that it comprises properties: a(i), b(x), c, d, and e.

[1272] In an embodiment, one or both of the gRNAs is configured such that it comprises properties: a(i), b(xi), and c(i).

[1273] In an embodiment, one or both of the gRNAs is configured such that it comprises properties: a(i), b(xi), and c(ii).

[1274] In an embodiment, one or both of the gRNAs is configured such that it comprises properties: a(i), b(xi), c, and d.

[1275] In an embodiment, one or both of the gRNAs is configured such that it comprises properties: a(i), b(xi), c, and e.

[1276] In an embodiment, one or both of the gRNAs is configured such that it comprises properties: a(i), b(xi), c, d, and e.

[1277] In an embodiment, the gRNAs are used with a Cas9 nickase molecule having HNH activity, e.g., a Cas9 molecule having the RuvC activity inactivated, e.g., a Cas9 molecule having a mutation at D10, e.g., the D10A mutation.

[1278] In an embodiment, the gRNAs are used with a Cas9 nickase molecule having RuvC activity, e.g., a Cas9 molecule having the HNH activity inactivated, e.g., a Cas9 molecule having a mutation at H840, e.g., a H840A or a mutation at N863, e.g., N863A.

[1279] VI. Target Cells and Genes

[1280] In some embodiments, Cas9 molecules, gRNA molecules (e.g., a Cas9 molecule/gRNA molecule RNP complex), and optionally donor template nucleic acids, of the present disclosure can be used to manipulate a cell ex vivo, e.g., to edit a target nucleic acid.

[1281] In an embodiment, a cell is manipulated ex vivo by editing (e.g., inducing a mutation in) one or more target genes, e.g., as described herein. In some embodiments, the expression of one or more target genes is modulated. In another embodiment, a cell is manipulated ex vivo by editing (e.g., inducing a mutation in) one or more target genes and/or modulating the expression of one or more target genes, and administered to a subject. Sources of target cells for ex vivo manipulation may include, e.g., the subject's blood, the subject's cord blood, or the subject's bone marrow. Sources of target cells for ex vivo manipulation may also include, e.g., heterologous donor blood, cord blood, or bone marrow.

[1282] VI.1 T Cells (e.g., Targeting FAS, BID, CTLA4, PDCD1, CBLB, PTPN6, TRAC or TRBC Genes)

[1283] In one aspect, the target cell is a T cell, e.g., a CD8+ T cell (e.g., a CD8+ naïve T cell, central memory T cell, or effector memory T cell), a CD4+ T cell, a natural killer T cell (NKT cells), a regulatory T cell (Treg), a stem cell memory T cell, a lymphoid progenitor cell a hematopoietic stem cell, a natural killer cell (NK cell) or a dendritic cell. In an embodiment, the target cell is an induced pluripotent stem cells (iPS) cell or a cell derived from an iPS cell, e.g., an iPS cell generated from a subject, manipulated to alter (e.g., induce a mutation in) or manipulate the expression of one or more target genes, e.g., FAS, BID, CTLA4, PDCD1, CBLB, PTPN6, TRAC or TRBC gene, and differentiated into, e.g., a T cell, e.g., a CD8+ T cell (e.g., a CD8+ naïve T cell, central memory T cell, or effector memory T cell), a CD4+ T cell, a stem cell memory T cell, a lymphoid progenitor cell or a hematopoietic stem cell.

[1284] In an embodiment, the target cell is manipulated ex vivo by editing (e.g., introducing a mutation in) the FAS, BID, CTLA4, PDCD1, CBLB, PTPN6, TRAC or TRBC target gene and/or modulating the expression of the FAS, BID, CTLA4, PDCD1, CBLB, PTPN6, TRAC or TRBC target gene, and administered to the subject. Sources of target cells for ex vivo manipulation may include, by way of example, the subject's blood, the subject's cord blood, or the subject's bone marrow. Sources of target cells for ex vivo manipulation may also include, by way of example, heterologous donor blood, cord blood, or bone marrow.

[1285] In an embodiment, the target cell has been altered to contain specific T cell receptor (TCR) genes (e.g., a TRAC and TRBC gene). In another embodiment, the TCR has binding specificity for a tumor associated antigen, e.g., carcinoembryonic antigen (CEA), GP100, melanoma antigen recognized by T cells 1 (MART1), melanoma antigen A3 (MAGEA3), NYESO1 or p53.

[1286] In an embodiment, the target cell has been altered to contain a specific chimeric antigen receptor (CAR). In an embodiment, the CAR has binding specificity for a tumor associated antigen, e.g., CD19, CD20, carbonic anhydrase IX (CAIX), CD171, CEA, ERBB2, GD2, alpha-folate receptor, Lewis Y antigen, prostate specific membrane antigen (PSMA) or tumor associated glycoprotein 72 (TAG72).

[1287] In another embodiment, the target cell has been altered to bind one or more of the following tumor antigens, e.g., by a TCR or a CAR. Tumor antigens may include, but are not limited to, AD034, AKT1, BRAP, CAGE, CDX2, CLP, CT-7, CT8/HOM-TES-85, cTAGE-1, Fibulin-1, HAGE, HCA587/MAGE-C2, hCAP-G, HCE661, HER2/neu, HLA-Cw, HOM-HD-21/Galectin9, HOM-MEEL-40/SSX2, HOM-RCC-3.1.3/CAXII, HOXA7, HOXB6, Hu, HUB1, KM-HN-3, KM-KN-1, KOC1, KOC2, KOC3, KOC3, LAGE-1, MAGE-1, MAGE-4a, MPP11, MSLN, NNP-1, NY-BR-1, NY-BR-62, NY-BR-85, NY-CO-37, NY-CO-38, NY-ESO-1, NY-ESO-5, NY-LU-12, NY-REN-10, NY-REN-19/LKB/STK11, NY-REN-21, NY-REN-26/BCR, NY-REN-3/NY-CO-38, NY-REN-33/SNC6, NY-REN-43, NY-REN-65, NY-REN-9, NY-SAR-35, OGFr, PLU-1, Rab38, RBPJkappa, RHAMM, SCP1, SCP-1, SSX3, SSX4, SSXS, TOP2A, TOP2B, or Tyrosinase.

[1288] Improving Cancer Immunotherapy

[1289] Adoptive transfer of genetically engineered T cells has entered clinical testing as a cancer therapeutic modality. Typically, the approach consists of the following steps: 1) obtaining leukocytes from the subject by apheresis; 2) selecting/enriching for T cells; 3) activating the T cells by cytokine treatment; 4) introducing cloned T cell receptor (TCR) genes or a chimeric antigen receptor (CAR) gene by retroviral transduction, lentiviral transduction or electroporation; 5) expanding the T cells by cytokine treatment; 6) conditioning the subject, usually by lymphodepletion; and 7) infusion of the engineered T cells into the subject.

[1290] Sources of cloned TCR genes (TRAC and TRBC) include rare T cell populations isolated from individuals with particular malignancies and T cell clones isolated from T cell receptor-humanized mice immunized with specific tumor antigens or tumor cells. Following adoptive transfer, TCR-engineered T cells recognize their cognate antigen peptides presented by major histocompatibility complex (WIC) proteins on the tumor cell surface. Antigen engagement stimulates signal transduction pathways leading to T cell activation and proliferation. Stimulated T cells then mount a cytotoxic anti-tumor cell response, typically involving a secreted complex comprising Granzyme B, perforin and granulysin, inducing tumor cell apoptosis.

[1291] Chimeric antigen receptor (CAR) genes encode artificial T cell receptors comprising an extra-cellular tumor antigen binding domain, typically derived from the single-chain antibody variable fragment (scFv) domain of a monoclonal antibody, fused via hinge and transmembrane domains to a cytoplasmic effector domain. The effector domain is typically derived from the CD3-zeta chain of the T cell co-receptor complex, and can also include domains derived from CD28 and/or CD137 receptor proteins. The CAR extra-cellular domain binds the tumor antigen in an MHC-independent manner leading to T cell activation and proliferation, culminating in cytotoxic anti-tumor activity as described for TCR engineered T cells.

[1292] To date, at least 15 different tumor antigens have been targeted in clinical trials of engineered T cells. In several trials, anti-tumor activity has been reported. The greatest success has been achieved in hematologic malignancies. For example, adoptive transfer of CAR-T cells engineered to target the B cell antigen, CD19, led to multiple partial and complete responses in subjects with lymphoma, acute lymphoblastic leukemia, acute lymphocytic leukemia and B-cell acute lymphocytic leukemia. In contrast, trials targeting other tumor types, especially solid tumors, including renal cell carcinoma, neuroblastoma, colorectal cancer, breast cancer, ovarian cancer, melanoma, sarcoma and prostate cancer, have been less successful. In many of these trials, very few patients experienced objective responses. Thus, there is a need to improve the anti-tumor efficacy of adoptively transferred engineered T cells.

[1293] In order for engineered T cells to mount an effective anti-tumor response they need to: 1) proliferate adequately following transfer to the subject to provide a sufficient number of specific tumor-targeting T cells; 2) survive in the subject for a length of time sufficient to maintain the required anti-tumor activity; and 3) evade the influence of suppressive factors produced by immune cells, tumor cells and other cells in the tumor environment so that the engineered T cells maintain a functional anti-tumor phenotype. Insufficient proliferation and/or survival, as well as susceptibility to inhibitory factors, can contribute to lack of efficacy of engineered T cells in subjects suffering from cancer. The methods and compositions disclosed herein address these issues in order to improve efficacy of engineered T cells as a cancer therapeutic modality.

[1294] In an embodiment, compositions and methods described herein can be used to affect proliferation of engineered T cells by altering the CBLB gene. While not wishing to be bound by theory, it is considered that reduced or absent expression of Casitas B-lineage lymphoma b protein (encoded by CBLB) reduces the requirement for exogenous interleukin signaling to promote proliferation of engineered T cells following transfer to the subject (Stromnes, I. M. et al., 2010 J. Clin. Invest. 120, 3722-3734).

[1295] In an embodiment, compositions and methods described herein can be used to affect proliferation of engineered T cells by altering the PTPN6 gene. While not wishing to be bound by theory, it is considered that reduced or absent expression of Src homology region 2 domain-containing phosphatase-1 protein (encoded by PTPN6) leads to increased short-term accumulation of transferred T cells with subsequently improved anti-tumor activity (Stromnes, I. M. et al., 2012 J. Immunol. 189, 1812-1825).

[1296] In an embodiment, compositions and methods described herein can be used to affect proliferation of engineered T cells by altering the FAS gene. While not wishing to be bound by theory, it is considered that reduced or absent expression of the Fas protein will inhibit induction of T cell apoptosis by Fas-ligand; a factor expressed by many cancer types (Dotti, G. et al., 2005 Blood 105, 4677-4684).

[1297] In an embodiment, compositions and methods described herein can be used to affect proliferation of engineered T cells by altering the BID gene. While not wishing to be bound by theory, it is considered that reduced or absent expression of the Bid protein prevents the induction of T cell apoptosis following activation of the Fas pathway (Lei, X. Y. et al., 2009 Immunol. Lett. 122, 30-36).

[1298] In an embodiment, compositions and methods described herein can be used to decrease the effect of immune suppressive factors on engineered T cells by altering the CTLA4 gene. While not wishing to be bound by theory, it is considered that reduced or absent expression of cytotoxic T-lymphocyte-associated antigen 4 (encoded by CTLA4) abrogates the induction of a non-responsive state (“anergy”) following binding of CD80 or CD86 expressed by antigen presenting cells in the tumor environment (Shrikant, P. et al, 1999 Immunity 11, 483-493).

[1299] In an embodiment, compositions and methods described herein can be used to decrease the effect of immune suppressive factors on engineered T cells by altering the PDCD1 gene. While not wishing to be bound by theory, it is considered that reduced or absent expression of the Programmed Cell Death Protein 1 (encoded by PDCD1) prevents induction of T cell apoptosis by engagement of PD1 Ligand expressed by tumor cells or cells in the tumor environment (Topalian, S. L. et al., 2012 N. Engl. J. Med. 366, 2443-2454).

[1300] In an embodiment, compositions and methods described herein can be used to improve T cell specificity and safety by altering the TRAC and/or TRBC gene. While not wishing to be bound by theory, it is considered that reduced or absent expression of T-cell receptors (encoded by TRAC and TRBC) prevents graft vs. host disease by eliminating T cell receptor recognition of and response to host tissues. This approach, therefore, could be used to generate “off the shelf” T cells (Torikai et al., 2012 Blood 119, 5697-5705). Also, while not wishing to be bound by theory, it is considered that reduced or absent expression of the TRAC and/or TRBC gene will reduce or eliminate mis-pairing of endogenous T cell receptors with exogenously introduced engineered T cell receptors, thus improving therapeutic efficacy (Provasi et al., 2012, Nature Medicine 18, 807-815).

[1301] In an embodiment, compositions and methods described herein can be used to decrease one or more of FAS, BID, CTLA4, PDCD1, CBLB, PTPN6, TRAC and TRBC genes to improve treatment of cancer immunotherapy using engineered T cells.

[1302] Disclosed herein are approaches to treat cancer via immunotherapy, using the compositions and methods described herein.

[1303] In one approach, one or more of the FAS, BID, CTLA4, PDCD1, CBLB, PTPN6, TRAC and TRBC genes are targeted as a targeted knockout or knockdown, e.g., to affect T cell proliferation, survival and/or function. In an embodiment, said approach comprises knocking out or knocking down one T-cell expressed gene (e.g., FAS, BID, CTLA4, PDCD1, CBLB, PTPN6, TRAC or TRBC gene). In another embodiment, the approach comprises knocking out or knocking down two T-cell expressed genes, e.g., two of FAS, BID, CTLA4, PDCD1, CBLB, PTPN6, TRAC or TRBC genes. In another embodiment, the approach comprises knocking out or knocking down three T-cell expressed genes, e.g., three of FAS, BID, CTLA4, PDCD1, CBLB, PTPN6, TRAC or TRBC genes. In another embodiment, the approach comprises knocking out or knocking down four T-cell expressed genes, e.g., four of FAS, BID, CTLA4, PDCD1, CBLB, PTPN6, TRAC or TRBC genes. In another embodiment, the approach comprises knocking out or knocking down five T-cell expressed genes, e.g., five of FAS, BID, CTLA4, PDCD1, CBLB, PTPN6, TRAC or TRBC genes. In another embodiment, the approach comprises knocking out or knocking down six T-cell expressed genes, e.g., six of FAS, BID, CTLA4, PDCD1, CBLB, PTPN6, TRAC or TRBC genes. In another embodiment, the approach comprises knocking out or knocking down seven T-cell expressed genes, e.g., seven of FAS, BID, CTLA4, PDCD1, CBLB, PTPN6, TRAC or TRBC genes. In another embodiment, the approach comprises knocking out or knocking down eight T-cell expressed genes, e.g., each of FAS, BID, CTLA4, PDCD1, CBLB, PTPN6, TRAC and TRBC genes.

[1304] While not wishing to be bound by theory, it is considered that adoptive transfer of genetically engineered T cells may provide a potential treatment for cancer. Genes encoding cell surface receptors are inserted into the T cells. The genetically engineered T cells are able to detect tumor associated antigens, which can be used to discriminate tumor cells from most normal tissues.

[1305] Knockout or knockdown of one or two alleles of the target gene (e.g., FAS, BID, CTLA4, PDCD1, CBLB, PTPN6, TRAC or TRBC gene) may be performed after disease onset, but preferably early in the disease course.

[1306] In an embodiment, the methods comprise initiating treatment of a subject after disease onset. In an embodiment, the method comprises initiating treatment of a subject well after disease onset, e.g., 1, 2, 3, 4, 5, 6, 7, 8, 9, 10, 12, 24, or 36 months after onset of cancer.

[1307] In an embodiment, the method comprises initiating treatment of a subject in an advanced stage of disease.

[1308] Overall, initiation of treatment for subjects at all stages of disease is expected to be of benefit to subjects.

[1309] Cancers that may be treated using the compositions and methods disclosed herein include cancers of the blood and solid tumors. For example, cancers that may be treated using the compositions and methods disclosed herein include, but are not limited to, lymphoma, chronic lymphocytic leukemia (CLL), B cell acute lymphocytic leukemia (B-ALL), acute lymphoblastic leukemia, acute myeloid leukemia, non-Hodgkin's lymphoma (NHL), diffuse large cell lymphoma (DELL), multiple myeloma, renal cell carcinoma (RCC), neuroblastoma, colorectal cancer, breast cancer, ovarian cancer, melanoma, sarcoma, prostate cancer, lung cancer, esophageal cancer, hepatocellular carcinoma, pancreatic cancer, astrocytoma, mesothelioma, head and neck cancer, and medulloblastoma.

[1310] Other Embodiments involving FAS, BID, CTLA4, PDCD1, CBLB, PTPN6, TRAC or TRBC Genes

[1311] In an embodiment, methods and compositions discussed herein can be used to affect T cell proliferation (e.g., by inactivating genes that inhibit T cell proliferation). In an embodiment, methods and compositions discussed herein can be used to affect T cell survival (e.g., by inactivating genes mediating T cell apoptosis). In an embodiment, methods and composition discussed herein can be used to affect T cell function (e.g., by inactivating genes encoding immunosuppressive and inhibitory (e.g., anergy-inducing) signaling factors). It is contemplated herein that the methods and compositions described above can be utilized individually or in combination to affect one or more of the factors limiting the efficacy of genetically modified T cells as cancer therapeutics, e.g., T cell proliferation, T cell survival, T cell function, or any combination thereof.

[1312] Methods and compositions discussed herein can be used to affect T cell proliferation, survival and/or function by altering one or more T-cell expressed genes, e.g., one or more of FAS, BID, CTLA4, PDCD1, CBLB, PTPN6, TRAC and/or TRBC genes. In an embodiment, methods and compositions described herein can be used to affect T cell proliferation by altering one or more T-cell expressed genes, e.g., the CBLB and/or PTPN6 gene. In an embodiment, methods and compositions described herein can be used to affect T cell survival by altering one or more T-cell expressed genes, e.g., FAS and/or BID gene. In an embodiment, methods and compositions described herein can be used to affect T cell function by altering one or more T-cell expressed gene or genes, e.g., CTLA4 and/or PDCD1 and/or TRAC and/or TRBC gene.

[1313] In one approach, one or more T-cell expressed genes, e.g., FAS, BID, CTLA4, PDCD1, CBLB, PTPN6, TRAC and/or TRBC genes, are independently targeted as a targeted knockout or knockdown, e.g., to influence T cell proliferation, survival and/or function. In an embodiment, the approach comprises knocking out or knocking down one T-cell expressed gene (e.g., FAS, BID, CTLA4, PDCD1, CBLB, PTPN6, TRAC or TRBC gene). In another embodiment, the approach comprises independently knocking out or knocking down two T-cell expressed genes, e.g., two of FAS, BID, CTLA4, PDCD1, CBLB, PTPN6, TRAC or TRBC genes. In another embodiment, the approach comprises independently knocking out or knocking down three T-cell expressed genes, e.g., three of FAS, BID, CTLA4, PDCD1, CBLB, PTPN6, TRAC or TRBC genes. In another embodiment, the approach comprises independently knocking out or knocking down four T-cell expressed genes, e.g., four of FAS, BID, CTLA4, PDCD1, CBLB, PTPN6, TRAC or TRBC genes. In another embodiment, the approach comprises independently knocking out or knocking down five T-cell expressed genes, e.g., five of FAS, BID, CTLA4, PDCD1, CBLB, PTPN6, TRAC or TRBC genes. In another embodiment, the approach comprises independently knocking out or knocking down six T-cell expressed genes, e.g., six of FAS, BID, CTLA4, PDCD1, CBLB, PTPN6, TRAC or TRBC genes. In another embodiment, the approach comprises independently knocking out or knocking down seven T-cell expressed genes, e.g., seven of FAS, BID, CTLA4, PDCD1, CBLB, PTPN6, TRAC or TRBC genes. In another embodiment, the approach comprises independently knocking out or knocking down eight T-cell expressed genes, e.g., each of FAS, BID, CTLA4, PDCD1, CBLB, PTPN6, TRAC and TRBC genes.

[1314] In addition to the genes described above, a number of other T-cell expressed genes may be targeted to affect the efficacy of engineered T cells. These genes include, but are not limited to TGFBRI, TGFBRII and TGFBRIII (Kershaw et al. 2013 Nat Rev Cancer 13, 525-541). It is contemplated herein that one or more of TGFBRI, TGFBRII or TGFBRIII gene can be altered either individually or in combination using the methods disclosed herein. It is further contemplated that one or more of TGFBRI, TGFBRII or TGFBRIII gene can be altered either individually or in combination with any one or more of the eight genes described above (i.e., FAS, BID, CTLA4, PDCD1, CBLB, PTPN6, TRAC or TRBC gene) using the methods disclosed herein.

[1315] In one aspect, methods and compositions discussed herein may be used to alter one or more of the FAS, BID, CTLA4, PDCD1, CBLB, PTPN6, TRAC and/or TRBC genes to affect T cell proliferation, survival and/or function by targeting the gene, e.g., the non-coding or coding regions, e.g., the promoter region, or a transcribed sequence, e.g., intronic or exonic sequence. In an embodiment, coding sequence, e.g., a coding region, e.g., an early coding region, of the FAS, BID, CTLA4, PDCD1, CBLB, PTPN6, TRAC and/or TRBC gene, is targeted for alteration and knockout of expression.

[1316] In another aspect, the methods and compositions discussed herein may be used to alter the FAS, BID, CTLA4, PDCD1, CBLB, PTPN6, TRAC and/or TRBC gene to affect T cell proliferation, survival and/or function by targeting the coding sequence of the FAS, BID, CTLA4, PDCD1, CBLB, PTPN6, TRAC and/or TRBC gene. In an embodiment, the gene, e.g., the coding sequence of the FAS, BID, CTLA4, PDCD1, CBLB, PTPN6, TRAC and/or TRBC gene, is targeted to knockout one or more of FAS, BID, CTLA4, PDCD1, CBLB, PTPN6, TRAC and/or TRBC gene, respectively, e.g., to eliminate expression of one or more of FAS, BID, CTLA4, PDCD1, CBLB, PTPN6, TRAC and/or TRBC gene, e.g., to knockout one or two alleles of one or more of FAS, BID, CTLA4, PDCD1, CBLB, PTPN6, TRAC and/or TRBC gene, e.g., by induction of an alteration comprising a deletion or mutation in one or more of FAS, BID, CTLA4, PDCD1, CBLB, PTPN6, TRAC and/or TRBC gene. In an embodiment, the method provides an alteration that comprises an insertion or deletion. As described herein, a targeted knockout approach is mediated by non-homologous end joining (NHEJ) using a CRISPR/Cas system comprising an enzymatically active Cas9 (eaCas9).

[1317] In an embodiment, an early coding sequence of the FAS, BID, CTLA4, PDCD1, CBLB, PTPN6, TRAC and/or TRBC gene is targeted to knockout one or more of FAS, BID, CTLA4, PDCD1, CBLB, PTPN6, TRAC and/or TRBC gene, respectively. In an embodiment, targeting affects one or two alleles of the FAS, BID, CTLA4, PDCD1, CBLB, PTPN6, TRAC and/or TRBC gene. In an embodiment, a targeted knockout approach reduces or eliminates expression of functional FAS, BID, CTLA4, PDCD1, CBLB, PTPN6, TRAC and/or TRBC gene product. In an embodiment, the method provides an alteration that comprises an insertion or deletion.

[1318] In another aspect, the methods and compositions discussed herein may be used to alter the FAS, BID, CTLA4, PDCD1, CBLB, PTPN6, TRAC and/or TRBC gene to affect T cell function by targeting non-coding sequence of the FAS, BID, CTLA4, PDCD1, CBLB, PTPN6, TRAC and/or TRBC gene, e.g., promoter, an enhancer, an intron, 3′UTR, and/or polyadenylation signal. In an embodiment, the gene, e.g., the non-coding sequence of the FAS, BID, CTLA4, PDCD1, CBLB, PTPN6, TRAC and/or TRBC gene, is targeted to knockout the gene, e.g., to eliminate expression of the gene, e.g., to knockout one or two alleles of the FAS, BID, CTLA4, PDCD1, CBLB, PTPN6, TRAC and/or TRBC gene, e.g., by induction of an alteration comprising a deletion or mutation in the FAS, BID, CTLA4, PDCD1, CBLB, PTPN6, TRAC and/or TRBC gene. In an embodiment, the method provides an alteration that comprises an insertion or deletion.

[1319] “T cell target FAS knockout position”, as used herein, refers to a position in the FAS gene, which if altered by NHEJ-mediated alteration, results in a reduction or elimination of expression of functional FAS gene product (e.g., knockout of expression of functional FAS gene product). In an embodiment, the position is in the FAS gene coding region, e.g., an early coding region.

[1320] “T cell target BID knockout position”, as used herein, refers to a position in the BID gene, which if altered by NHEJ-mediated alteration, results in a reduction or elimination of expression of functional BID gene product (e.g., knockout of expression of functional BID gene product). In an embodiment, the position is in the BID gene coding region, e.g., an early coding region.

[1321] “T cell target CTLA4 knockout position”, as used herein, refers to a position in the CTLA4 gene, which if altered by NHEJ-mediated alteration, results in a reduction or elimination of expression of functional CTLA4 gene product (e.g., knockout of expression of functional CTLA4 gene product). In an embodiment, the position is in the CTLA4 gene coding region, e.g., an early coding region.

[1322] “T cell target PDCD1 knockout position”, as used herein, refers to a position in the PDCD1 gene, which if altered by NHEJ-mediated alteration, results in a reduction or elimination of expression of functional PDCD1 gene product (e.g., knockout of expression of functional PDCD1 gene product). In an embodiment, the position is in the PDCD1 gene coding region, e.g., an early coding region.

[1323] “T cell target CBLB knockout position”, as used herein, refers to a position in the CBLB gene, which if altered by NHEJ-mediated alteration, results in a reduction or elimination of expression of functional CBLB gene product (e.g., knockout of expression of functional CBLB gene product). In an embodiment, the position is in the CBLB gene coding region, e.g., an early coding region.

[1324] “T cell target PTPN6 knockout position”, as used herein, refers to a position in the PTPN6 gene, which if altered by NHEJ-mediated alteration, results in a reduction or elimination of expression of functional PTPN6 gene product (e.g., knockout of expression of functional PTPN6 gene product). In an embodiment, the position is in the PTPN6 gene coding region, e.g., an early coding region.

[1325] “T cell target TRAC knockout position”, as used herein, refers to a position in the TRAC gene, which if altered by NHEJ-mediated alteration, results in a reduction or elimination of expression of functional TRAC gene product (e.g., knockout of expression of functional TRAC gene product). In an embodiment, the position is in the TRAC gene coding region, e.g., an early coding region.

[1326] “T cell target TRBC knockout position”, as used herein, refers to a position in the TRBC gene, which if altered by NHEJ-mediated alteration, results in a reduction or elimination of expression of functional TRBC gene product (e.g., knockout of expression of functional TRBC gene product). In an embodiment, the position is in the TRBC gene coding region, e.g., an early coding region.

[1327] In another aspect, methods and compositions discussed herein may be used to alter the expression of one or more T cell-expressed genes, e.g., the FAS, BID, CTLA4, PDCD1, CBLB, or PTPN6 genes, to affect T cell function by targeting a promoter region of the FAS, BID, CTLA4, PDCD1, CBLB, or PTPN6 gene. In an embodiment, the promoter region of the FAS, BID, CTLA4, PDCD1, CBLB, or PTPN6 gene is targeted to knockdown expression of the FAS, BID, CTLA4, PDCD1, CBLB, or PTPN6 gene. A targeted knockdown approach reduces or eliminates expression of functional the FAS, BID, CTLA4, PDCD1, CBLB, and/or PTPN6 gene product. As described herein, a targeted knockdown is mediated by targeting an enzymatically inactive Cas9 (eiCas9) or an eiCas9 fused to a transcription repressor domain or chromatin modifying protein to alter transcription, e.g., to block, reduce, or decrease transcription, of the FAS, BID, CTLA4, PDCD1, CBLB and/or PTPN6 genes.

[1328] “T cell target FAS knockdown position”, as used herein, refers to a position, e.g., in the FAS gene, which if targeted by an eiCas9 or an eiCas9 fusion protein described herein, results in reduction or elimination of expression of functional FAS gene product. In an embodiment, transcription is reduced or eliminated. In an embodiment, the position is in the FAS promoter sequence. In an embodiment, a position in the promoter sequence of the FAS gene is targeted by an enzymatically inactive Cas9 (eiCas9) or an eiCas9-fusion protein, as described herein.

[1329] “T cell target BID knockdown position”, as used herein, refers to a position, e.g., in the BID gene, which if targeted by an eiCas9 or an eiCas9 fusion protein described herein, results in reduction or elimination of expression of functional BID gene product. In an embodiment, transcription is reduced or eliminated. In an embodiment, the position is in the BID promoter sequence. In an embodiment, a position in the promoter sequence of the BID gene is targeted by an enzymatically inactive Cas9 (eiCas9) or an eiCas9-fusion protein, as described herein.

[1330] “T cell target CTLA4 knockdown position”, as used herein, refers to a position, e.g., in the CTLA4 gene, which if targeted by an eiCas9 or an eiCas9 fusion protein described herein, results in reduction or elimination of expression of functional CTLA4 gene product. In an embodiment, transcription is reduced or eliminated. In an embodiment, the position is in the CTLA4 promoter sequence. In an embodiment, a position in the promoter sequence of the CTLA4 gene is targeted by an enzymatically inactive Cas9 (eiCas9) or an eiCas9-fusion protein, as described herein.

[1331] “T cell target PDCD1 knockdown position”, as used herein, refers to a position, e.g., in the PDCD1 gene, which if targeted by an eiCas9 or an eiCas9 fusion protein described herein, results in reduction or elimination of expression of functional PDCD1 gene product. In an embodiment, transcription is reduced or eliminated. In an embodiment, the position is in the PDCD1 promoter sequence. In an embodiment, a position in the promoter sequence of the PDCD1 gene is targeted by an enzymatically inactive Cas9 (eiCas9) or an eiCas9-fusion protein, as described herein.

[1332] “T cell target CBLB knockdown position”, as used herein, refers to a position, e.g., in the CBLB gene, which if targeted by an eiCas9 or an eiCas9 fusion protein described herein, results in reduction or elimination of expression of functional CBLB gene product. In an embodiment, transcription is reduced or eliminated. In an embodiment, the position is in the CBLB promoter sequence. In an embodiment, a position in the promoter sequence of the CBLB gene is targeted by an enzymatically inactive Cas9 (eiCas9) or an eiCas9-fusion protein, as described herein.

[1333] “T cell target PTPN6 knockdown position”, as used herein, refers to a position, e.g., in the PTPN6 gene, which if targeted by an eiCas9 or an eiCas9 fusion protein described herein, results in reduction or elimination of expression of functional PTPN6 gene product. In an embodiment, transcription is reduced or eliminated. In an embodiment, the position is in the PTPN6 promoter sequence. In an embodiment, a position in the promoter sequence of the PTPN6 gene is targeted by an enzymatically inactive Cas9 (eiCas9) or an eiCas9-fusion protein, as described herein.

[1334] “T cell target FAS position”, as used herein, refers to any of the T cell target FAS knockout position and/or T cell target FAS knockdown position, as described herein.

[1335] “T cell target BID position”, as used herein, refers to any of the T cell target BID knockout position and/or T cell target BID knockdown position, as described herein.

[1336] “T cell target CTLA4 position”, as used herein, refers to any of the T cell target CTLA4 knockout position and/or T cell target CTLA4 knockdown position, as described herein.

[1337] “T cell target PDCD1 position”, as used herein, refers to any of the T cell target PDCD1 knockout position and/or T cell target PDCD1 knockdown position, as described herein.

[1338] “T cell target CBLB position”, as used herein, refers to any of the T cell target CBLB knockout position and/or T cell target CBLB knockdown position, as described herein.

[1339] “T cell target PTPN6 position”, as used herein, refers to any of the T cell target PTPN6 knockout position and/or T cell target PTPN6 knockdown position, as described herein.

[1340] “T cell target TRAC position”, as used herein, refers to any of the T cell target TRAC knockout position, as described herein.

[1341] “T cell target TRBC position”, as used herein, refers to any of the T cell target TRBC knockout position, as described herein.

[1342] “T cell target knockout position”, as used herein, refers to any of the T cell target FAS knockout position, T cell target BID knockout position, T cell target CTLA4 knockout position, T cell target PDCD1 knockout position, T cell target CBLB knockout position, T cell target PTPN6 knockout position, T cell target TRAC knockout position, or T cell target TRBC knockout position, as described herein.

[1343] “T cell target knockdown position”, as used herein, refers to any of the T cell target FAS knockdown position, T cell target BID knockdown position, T cell target CTLA4 knockdown position, T cell target PDCD1 knockdown position, T cell target CBLB knockdown position, or T cell target PTPN6 knockdown position, as described herein.

[1344] “T cell target position”, as used herein, refers to any of a T cell target knockout position or T cell target knockdown position, as described herein.

[1345] In one aspect, disclosed herein is a gRNA molecule, e.g., an isolated or non-naturally occurring gRNA molecule, comprising a targeting domain which is complementary with a target domain from the FAS, BID, CTLA4, PDCD1, CBLB, PTPN6, TRAC or TRBC gene.

[1346] In an embodiment, the targeting domain of the gRNA molecule is configured to provide a cleavage event, e.g., a double strand break or a single strand break, sufficiently close to a T cell target position in the FAS, BID, CTLA4, PDCD1, CBLB, PTPN6, TRAC or TRBC gene to allow alteration, e.g., alteration associated with NHEJ, of a T cell target position in the FAS, BID, CTLA4, PDCD1, CBLB, PTPN6, TRAC or TRBC gene. In an embodiment, the targeting domain is configured such that a cleavage event, e.g., a double strand or single strand break, is positioned within 1, 2, 3, 4, 5, 10, 15, 20, 25, 30, 35, 40, 45, 50, 60, 70, 80, 90, 100, 150, 200, 250, 300, 350, 400, 450 or 500 nucleotides of a T cell target position. The break, e.g., a double strand or single strand break, can be positioned upstream or downstream of a T cell target position in the FAS, BID, CTLA4, PDCD1, CBLB, PTPN6, TRAC or TRBC gene.

[1347] In an embodiment, a second gRNA molecule comprising a second targeting domain is configured to provide a cleavage event, e.g., a double strand break or a single strand break, sufficiently close to the T cell target position in the FAS, BID, CTLA4, PDCD1, CBLB, PTPN6, TRAC or TRBC gene, to allow alteration, e.g., alteration associated with NHEJ, of the T cell target position in the FAS, BID, CTLA4, PDCD1, CBLB, PTPN6, TRAC or TRBC gene, either alone or in combination with the break positioned by the first gRNA molecule. In an embodiment, the targeting domains of the first and second gRNA molecules are configured such that a cleavage event, e.g., a double strand or single strand break, is positioned, independently for each of the gRNA molecules, within 1, 2, 3, 4, 5, 10, 15, 20, 25, 30, 35, 40, 45, 50, 60, 70, 80, 90, 100, 150, 200, 250, 300, 350, 400, 450 or 500 nucleotides of the target position. In an embodiment, the breaks, e.g., double strand or single strand breaks, are positioned on both sides of a nucleotide of a T cell target position in the FAS, BID, CTLA4, PDCD1, CBLB, PTPN6, TRAC or TRBC gene. In an embodiment, the breaks, e.g., double strand or single strand breaks, are positioned on one side, e.g., upstream or downstream, of a nucleotide of a T cell target position in the FAS, BID, CTLA4, PDCD1, CBLB, PTPN6, TRAC or TRBC gene.

[1348] In an embodiment, a single strand break is accompanied by an additional single strand break, positioned by a second gRNA molecule, as discussed below. For example, the targeting domains are configured such that a cleavage event, e.g., the two single strand breaks, are positioned within 1, 2, 3, 4, 5, 10, 15, 20, 25, 30, 35, 40, 45, 50, 60, 70, 80, 90, 100, 150, 200, 250, 300, 350, 400, 450 or 500 nucleotides of a T cell target position. In an embodiment, the first and second gRNA molecules are configured such that, when guiding a Cas9 nickase, a single strand break will be accompanied by an additional single strand break, positioned by a second gRNA, sufficiently close to one another to result in alteration of a T cell target position in the FAS, BID, CTLA4, PDCD1, CBLB, PTPN6, TRAC or TRBC gene. In an embodiment, the first and second gRNA molecules are configured such that a single strand break positioned by the second gRNA is within 10, 20, 30, 40, or 50 nucleotides of the break positioned by the first gRNA molecule, e.g., when the Cas9 is a nickase. In an embodiment, the two gRNA molecules are configured to position cuts at the same position, or within a few nucleotides of one another, on different strands, e.g., essentially mimicking a double strand break.

[1349] In an embodiment, a double strand break can be accompanied by an additional double strand break, positioned by a second gRNA molecule, as is discussed below. For example, the targeting domain of a first gRNA molecule is configured such that a double strand break is positioned upstream of a T cell target position in the FAS, BID, CTLA4, PDCD1, CBLB, PTPN6, TRAC or TRBC gene, e.g., within 1, 2, 3, 4, 5, 10, 15, 20, 25, 30, 35, 40, 45, 50, 60, 70, 80, 90, 100, 150, 200, 250, 300, 350, 400, 450 or 500 nucleotides of the target position; and the targeting domain of a second gRNA molecule is configured such that a double strand break is positioned downstream of a T cell target position in the FAS, BID, CTLA4, PDCD1, CBLB, PTPN6, TRAC or TRBC gene, e.g., within 1, 2, 3, 4, 5, 10, 15, 20, 25, 30, 35, 40, 45, 50, 60, 70, 80, 90, 100, 150, 200, 250, 300, 350, 400, 450 or 500 nucleotides of the target position.

[1350] In an embodiment, a double strand break can be accompanied by two additional single strand breaks, positioned by a second gRNA molecule and a third gRNA molecule. For example, the targeting domain of a first gRNA molecule is configured such that a double strand break is positioned upstream of a T cell target position in the FAS, BID, CTLA4, PDCD1, CBLB, PTPN6, TRAC or TRBC gene, e.g., within 1, 2, 3, 4, 5, 10, 15, 20, 25, 30, 35, 40, 45, 50, 60, 70, 80, 90, 100, 150, 200, 250, 300, 350, 400, 450 or 500 nucleotides of the target position; and the targeting domains of a second and third gRNA molecule are configured such that two single strand breaks are positioned downstream of a T cell target position in the FAS, BID, CTLA4, PDCD1, CBLB, PTPN6, TRAC or TRBC gene, e.g., within 1, 2, 3, 4, 5, 10, 15, 20, 25, 30, 35, 40, 45, 50, 60, 70, 80, 90, 100, 150, 200, 250, 300, 350, 400, 450 or 500 nucleotides of the target position. In an embodiment, the targeting domain of the first, second and third gRNA molecules are configured such that a cleavage event, e.g., a double strand or single strand break, is positioned, independently for each of the gRNA molecules.

[1351] In an embodiment, a first and second single strand break can be accompanied by two additional single strand breaks positioned by a third gRNA molecule and a fourth gRNA molecule. For example, the targeting domain of a first and second gRNA molecule are configured such that two single strand breaks are positioned upstream of a T cell target position in the FAS, BID, CTLA4, PDCD1, CBLB, PTPN6, TRAC or TRBC gene, e.g., within 1, 2, 3, 4, 5, 10, 15, 20, 25, 30, 35, 40, 45, 50, 60, 70, 80, 90, 100, 150, 200, 250, 300, 350, 400, 450 or 500 nucleotides of the target position; and the targeting domains of a third and fourth gRNA molecule are configured such that two single strand breaks are positioned downstream of a T cell target position in the FAS, BID, CTLA4, PDCD1, CBLB, PTPN6, TRAC or TRBC gene, e.g., within 1, 2, 3, 4, 5, 10, 15, 20, 25, 30, 35, 40, 45, 50, 60, 70, 80, 90, 100, 150, 200, 250, 300, 350, 400, 450 or 500 nucleotides of the target position.

[1352] It is contemplated herein that when multiple gRNAs are used to generate (1) two single stranded breaks in close proximity, (2) two double stranded breaks, e.g., flanking a position (e.g., to remove a piece of DNA, e.g., to create a deletion mutation) or to create more than one indel in the gene, e.g., in a coding region, e.g., an early coding region, (3) one double stranded break and two paired nicks flanking a position (e.g., to remove a piece of DNA, e.g., to insert a deletion) or (4) four single stranded breaks, two on each side of a position, that they are targeting the same T cell target position. It is further contemplated herein that multiple gRNAs may be used to target more than one position in the same gene.

[1353] When two or more gRNAs are used to position two or more cleavage events, e.g., double strand or single strand breaks, in a target nucleic acid, it is contemplated that the two or more cleavage events may be made by the same or different Cas9 proteins. For example, when two gRNAs are used to position two double stranded breaks in a target nucleic acid, a single Cas9 nuclease may be used to create both double stranded breaks. When two or more gRNAs are used to position two or more single stranded breaks (also referred to as nicks) in a target nucleic acid, a single Cas9 nickase may be used to create the two or more nicks. When two or more gRNAs are used to position at least one double stranded break and at least one single stranded break in a target nucleic acid, two Cas9 proteins may be used, e.g., one Cas9 nuclease and one Cas9 nickase. It is contemplated that when two or more Cas9 proteins are used that the two or more Cas9 proteins may be delivered sequentially to control specificity of a double stranded versus a single stranded break at the desired position in the target nucleic acid. In another embodiment, when two or more Cas9 proteins are used, the Cas9 proteins may be from different species. For example, when two or more gRNAs are used to position at least one double stranded break and at least one single stranded break in a target nucleic acid, the Cas9 nuclease generating the double stranded break may be from one bacterial species and the Cas9 nickase generating the single stranded break may be from a different bacterial species.

[1354] When more than one gene is targeted for alteration in a cell, the targeted nucleic acids may be altered, e.g., cleaved, by one or more Cas9 proteins. For example, if two genes are targeted for alteration, e.g., both genes are targeted for knockdown, the same or a different Cas9 protein may be used to target each gene. In one embodiment, both genes (or each gene targeted in a cell), are cleaved by a Cas9 nuclease to generate a double stranded break. In another embodiment, both genes (or each gene targeted in a cell), are cleaved by a Cas9 nuclease to generate a double stranded break. In another embodiment, one or more genes in a cell may be altered by cleavage with a Cas9 nuclease and one or more genes in the same cell may be altered by cleavage with a Cas9 nickase. When two or more Cas9 proteins are used to cut a target nucleic acid, e.g., different genes in a cell, the Cas9 proteins may be from different bacterial species. For example, one or more genes in a cell may be altered by cleavage with a Cas9 protein from one bacterial species, and one or more genes in the same cell may be altered by cleavage with a Cas9 protein from a different bacterial species. It is contemplated that when two or more Cas9 proteins from different species are used that they may be delivered at the same time or delivered sequentially to control specificity of cleavage in the desired gene at the desired position in the target nucleic acid.

[1355] In some embodiments, the targeting domain of the first gRNA molecule and the targeting domain of the second gRNA molecules are complementary to opposite strands of the target nucleic acid molecule. In some embodiments, the gRNA molecule and the second gRNA molecule are configured such that the PAMs are oriented outward.

[1356] In an embodiment, the targeting domain of a gRNA molecule is configured to avoid unwanted target chromosome elements, such as repeat elements, e.g., Alu repeats, in the target domain. The gRNA molecule may be a first, second, third and/or fourth gRNA molecule.

[1357] In an embodiment, the targeting domain of a gRNA molecule is configured to position a cleavage event sufficiently far from a preselected nucleotide, e.g., the nucleotide of a coding region, such that the nucleotide is not be altered. In an embodiment, the targeting domain of a gRNA molecule is configured to position an intronic cleavage event sufficiently far from an intron/exon border, or naturally occurring splice signal, to avoid alteration of the exonic sequence or unwanted splicing events. The gRNA molecule may be a first, second, third and/or fourth gRNA molecule, as described herein.

[1358] In other embodiments, a position in the coding region, e.g., the early coding region, of the FAS, BID, CTLA4, PDCD1, CBLB, PTPN6, TRAC or TRBC gene is targeted, e.g., for knockout.

[1359] In an embodiment, the targeting domain of the gRNA molecule is configured to target an enzymatically inactive Cas9 (eiCas9) or an eiCas9 fusion protein (e.g., an eiCas9 fused to a transcription repressor domain), sufficiently close to a T cell knockdown target position to reduce, decrease or repress expression of the FAS, BID, CTLA4, PDCD1, CBLB, or PTPN6 gene. In an embodiment, the targeting domain is configured to target the promoter region of the FAS, BID, CTLA4, PDCD1, CBLB, or PTPN6 gene to block transcription initation, binding of one or more transcription enhancers or activators, and/or RNA polymerase. One or more gRNA may be used to target an eiCas9 to the promoter region of the FAS, BID, CTLA4, PDCD1, CBLB, or PTPN6 gene.

[1360] In an embodiment, the gRNA, e.g., a gRNA comprising a targeting domain, which is complementary with the FAS, BID, CTLA4, PDCD1, CBLB, PTPN6, TRAC or TRBC gene, is a modular gRNA. In other embodiments, the gRNA is a unimolecular or chimeric gRNA.

[1361] In an embodiment, the targeting domain which is complementary with the FAS, BID, CTLA4, PDCD1, CBLB, PTPN6, TRAC or TRBC gene comprises 16 or more nucleotides in length. In an embodiment, the targeting domain which is complementary with a target domain from the FAS, BID, CTLA4, PDCD1, CBLB, PTPN6, TRAC or TRBC gene is 16 nucleotides or more in length. In an embodiment, the targeting domain is 16 nucleotides in length. In an embodiment, the targeting domain is 17 nucleotides in length. In an embodiment, the targeting domain is 18 nucleotides in length. In an embodiment, the targeting domain is 19 nucleotides in length. In an embodiment, the targeting domain is 20 nucleotides in length. In an embodiment, the targeting domain is 21 nucleotides in length. In an embodiment, the targeting domain is 22 nucleotides in length. In an embodiment, the targeting domain is 23 nucleotides in length. In an embodiment, the targeting domain is 24 nucleotides in length. In an embodiment, the targeting domain is 25 nucleotides in length. In an embodiment, the targeting domain is 26 nucleotides in length.

[1362] In an embodiment, the targeting domain comprises 16 nucleotides. In an embodiment, the targeting domain comprises 17 nucleotides. In an embodiment, the targeting domain comprises 18 nucleotides. In an embodiment, the targeting domain comprises 19 nucleotides. In an embodiment, the targeting domain comprises 20 nucleotides. In an embodiment, the targeting domain comprises 21 nucleotides. In an embodiment, the targeting domain comprises 22 nucleotides. In an embodiment, the targeting domain comprises 23 nucleotides. In an embodiment, the targeting domain comprises 24 nucleotides. In an embodiment, the targeting domain comprises 25 nucleotides. In an embodiment, the targeting domain comprises 26 nucleotides.

[1363] A gRNA as described herein may comprise from 5′ to 3′: a targeting domain (comprising a “core domain”, and optionally a “secondary domain”); a first complementarity domain; a linking domain; a second complementarity domain; a proximal domain; and a tail domain. In some embodiments, the proximal domain and tail domain are taken together as a single domain.

[1364] In an embodiment, a gRNA comprises a linking domain of no more than 25 nucleotides in length; a proximal and tail domain, that taken together, are at least 20 nucleotides in length; and a targeting domain of equal to or greater than 16, 17, 18, 19, 20, 21, 22, 23, 24, 25 or 26 nucleotides in length.

[1365] In another embodiment, a gRNA comprises a linking domain of no more than 25 nucleotides in length; a proximal and tail domain, that taken together, are at least 30 nucleotides in length; and a targeting domain of equal to or greater than 16, 17, 18, 19, 20, 21, 22, 23, 24, 25 or 26 nucleotides in length.

[1366] In another embodiment, a gRNA comprises a linking domain of no more than 25 nucleotides in length; a proximal and tail domain, that taken together, are at least 30 nucleotides in length; and a targeting domain of equal to or greater than 16, 17, 18, 19, 20, 21, 22, 23, 24, 25 or 26 nucleotides in length.

[1367] In another embodiment, a gRNA comprises a linking domain of no more than 25 nucleotides in length; a proximal and tail domain, that taken together, are at least 40 nucleotides in length; and a targeting domain of equal to or greater than 16, 17, 18, 19, 20, 21, 22, 23, 24, 25 or 26 nucleotides in length.

[1368] A cleavage event, e.g., a double strand or single strand break, is generated by a Cas9 molecule. The Cas9 molecule may be an enzymatically active Cas9 (eaCas9) molecule, e.g., an eaCas9 molecule that forms a double strand break in a target nucleic acid or an eaCas9 molecule forms a single strand break in a target nucleic acid (e.g., a nickase molecule). Alternatively, in some embodiments, the Cas9 molecule may be an enzymatically inactive Cas9 (eiCas9) molecule or a modified eiCas9 molecule, e.g., the eiCas9 molecule is fused to Kruppel-associated box (KRAB) to generate an eiCas9-KRAB fusion protein molecule.

[1369] In an embodiment, the eaCas9 molecule catalyzes a double strand break.

[1370] In some embodiments, the eaCas9 molecule comprises HNH-like domain cleavage activity but has no, or no significant, N-terminal RuvC-like domain cleavage activity. In this case, the eaCas9 molecule is an HNH-like domain nickase, e.g., the eaCas9 molecule comprises a mutation at D10, e.g., D10A. In other embodiments, the eaCas9 molecule comprises N-terminal RuvC-like domain cleavage activity but has no, or no significant, HNH-like domain cleavage activity. In an embodiment, the eaCas9 molecule is an N-terminal RuvC-like domain nickase, e.g., the eaCas9 molecule comprises a mutation at H840, e.g., H840A. In an embodiment, the eaCas9 molecule is an N-terminal RuvC-like domain nickase, e.g., the eaCas9 molecule comprises a mutation at N863, e.g., N863A.

[1371] In an embodiment, a single strand break is formed in the strand of the target nucleic acid to which the targeting domain of the gRNA is complementary. In another embodiment, a single strand break is formed in the strand of the target nucleic acid other than the strand to which the targeting domain of the gRNA is complementary.

[1372] In another aspect, disclosed herein is a composition comprising (a) a gRNA molecule comprising a targeting domain that is complementary with a target domain in the FAS, BID, CTLA4, PDCD1, CBLB, PTPN6, TRAC or TRBC gene, as described herein. The composition of (a) may further comprise (b) a Cas9 molecule, e.g., a Cas9 molecule as described herein. The Cas9 molecule may be an enzymatically active Cas9 (eaCas9) molecule, e.g., an eaCas9 molecule that forms a double strand break in a target nucleic acid or an eaCas9 molecule forms a single strand break in a target nucleic acid (e.g., a nickase molecule). Alternatively, in some embodiments, the Cas9 molecule may be an enzymatically inactive Cas9 (eiCas9) molecule or a modified eiCas9 molecule, e.g., the eiCas9 molecule is fused to Kruppel-associated box (KRAB) to generate an eiCas9-KRAB fusion protein molecule.

[1373] A composition of (a) and (b) may further comprise (c) a second, third and/or fourth gRNA molecule, e.g., a second, third and/or fourth gRNA molecule described herein. In an embodiment, a composition may comprise at least two gRNA molecules to target two or more of FAS, BID, CTLA4, PDCD1, CBLB, PTPN6, TRAC and TRBC genes. In an embodiment, the composition further comprises a governing gRNA molecule, or a nucleic acid that encodes a governing gRNA molecule.

[1374] In another aspect, disclosed herein is a method of altering a cell, e.g., altering the structure, e.g., altering the sequence, of a target nucleic acid of a cell, comprising contacting the cell with: (a) a gRNA that targets the FAS, BID, CTLA4, PDCD1, CBLB, PTPN6, TRAC or TRBC gene, e.g., a gRNA as described herein; (b) a Cas9 molecule, e.g., a Cas9 molecule as described herein; and optionally, (c) a second, third and/or fourth gRNA that targets FAS, BID, CTLA4, PDCD1, CBLB, PTPN6, TRAC or TRBC gene, e.g., a gRNA, as described herein. In an embodiment, the method further comprises, introducing into the cell, a governing gRNA molecule, or a nucleic acid that encodes a governing gRNA molecule, into the cell.

[1375] In some embodiments, the method comprises contacting the cell with (a) and (b).

[1376] In some embodiments, the method comprises contacting the cell with (a), (b), and (c).

[1377] In an embodiment, the method of altering a cell, e.g., altering the structure, e.g., altering the sequence, of a target nucleic acid of a cell, comprising altering two or more of FAS, BID, CTLA4, PDCD1, CBLB, PTPN6, TRAC or TRBC genes. When two or more genes are altered in a cell, the cell is contacted with: (a) gRNAs that target two or more of the FAS, BID, CTLA4, PDCD1, CBLB, PTPN6, TRAC or TRBC genes; (b) a Cas9 molecule, e.g., a Cas9 molecule as described herein; and optionally, (c) second, third and/or fourth gRNAs that respectively targets the two or more genes selected in (a). In an embodiment, the method further comprises, introducing into the cell, a governing gRNA molecule, or a nucleic acid that encodes a governing gRNA molecule, into the cell.

[1378] In an embodiment, the method of altering a cell comprises altering two or more of FAS, BID, CTLA4, PDCD1, CBLB, PTPN6, TRAC or TRBC genes.

[1379] In an embodiment, the method of altering a cell comprises altering three or more of FAS, BID, CTLA4, PDCD1, CBLB, PTPN6, TRAC or TRBC genes.

[1380] In an embodiment, the method of altering a cell comprises altering four or more of FAS, BID, CTLA4, PDCD1, CBLB, PTPN6, TRAC or TRBC genes.

[1381] In an embodiment, the method of altering a cell comprises altering five or more of FAS, BID, CTLA4, PDCD1, CBLB, PTPN6, TRAC or TRBC genes.

[1382] In an embodiment, the method of altering a cell comprises altering six or more of FAS, BID, CTLA4, PDCD1, CBLB, PTPN6, TRAC or TRBC genes.

[1383] In an embodiment, the method of altering a cell comprises altering seven or more of FAS, BID, CTLA4, PDCD1, CBLB, PTPN6, TRAC or TRBC genes.

[1384] In an embodiment, the method of altering a cell comprises altering each of FAS, BID, CTLA4, PDCD1, CBLB, PTPN6, TRAC or TRBC genes.

[1385] In some embodiments, the method comprises contacting a cell from a subject suffering from cancer. The cell may be from a subject that would benefit from having a mutation at a T cell target position.

[1386] In some embodiments, the cell being contacted in the disclosed method is a T cell. The contacting may be performed ex vivo and the contacted cell may be returned to the subject's body after the contacting step. The T cell may be an engineered T cell, e.g., an engineered CAR (chimeric antigen receptor) T cell or an engineered TCR (T-cell receptor) T cell. A T cell may engineered to express a TCR or a CAR prior to, after, or at the same time as introducing a T cell target position mutation in one or more of the FAS, BID, CTLA4, PDCD1, CBLB, PTPN6, TRAC or TRBC gene.

[1387] In some embodiments, the method of altering a cell as described herein comprises acquiring knowledge of the sequence of a T cell target position in the cell, prior to the contacting step. Acquiring knowledge of the sequence of a T cell target position in the cell may be by sequencing the FAS, BID, CTLA4, PDCD1, CBLB, PTPN6, TRAC or TRBC gene, or a portion of the FAS, BID, CTLA4, PDCD1, CBLB, PTPN6, TRAC or TRBC gene.

[1388] In an embodiment, contacting comprises delivering to the cell a Cas9 molecule of (b), as a protein or an mRNA, the gRNA of (a), as an RNA, and optionally the second gRNA of (c), as an RNA.

[1389] In an embodiment, contacting comprises delivering to the cell a gRNA of (a) as an RNA, optionally the second gRNA of (c) as an RNA, and a nucleic acid that encodes the Cas9 molecule of (b).

[1390] In another aspect, disclosed herein is a method of treating a subject suffering from cancer, e.g., altering the structure, e.g., sequence, of a target nucleic acid of the subject, comprising contacting a cell from the subject with:

[1391] (a) a gRNA that targets the FAS, BID, CTLA4, PDCD1, CBLB, PTPN6, TRAC or TRBC gene, e.g., a gRNA disclosed herein;

[1392] (b) a Cas9 molecule, e.g., a Cas9 molecule disclosed herein; and

[1393] optionally, (c)(i) a second gRNA that targets the FAS, BID, CTLA4, PDCD1, CBLB, PTPN6, TRAC or TRBC gene, e.g., a second gRNA disclosed herein, and

[1394] further optionally, (c)(ii) a third gRNA, and still further optionally, (c)(iii) a fourth gRNA that target the FAS, BID, CTLA4, PDCD1, CBLB, PTPN6, TRAC or TRBC gene, e.g., a third and fourth gRNA disclosed herein. In an embodiment, the method further comprises, introducing into a cell of the subject, a governing gRNA molecule, or a nucleic acid that encodes a governing gRNA molecule.

[1395] In some embodiments, contacting comprises contacting with (a) and (b).

[1396] In some embodiments, contacting comprises contacting with (a), (b), and (c)(i).

[1397] In some embodiments, contacting comprises contacting with (a), (b), (c)(i) and (c)(ii).

[1398] In some embodiments, contacting comprises contacting with (a), (b), (c)(i), (c)(ii) and (c)(iii).

[1399] In an embodiment, the method of treating a subject suffering from cancer, comprises altering two or more of FAS, BID, CTLA4, PDCD1, CBLB, PTPN6, TRAC or TRBC genes, e.g., altering the structure, e.g., sequence, of two or more target nucleic acids of the subject (e.g., two or more of FAS, BID, CTLA4, PDCD1, CBLB, PTPN6, TRAC or TRBC genes). When two or more genes are altered in a cell from the subject, a cell from the subject is contacted with: (a) gRNAs that target two or more of the FAS, BID, CTLA4, PDCD1, CBLB, PTPN6, TRAC or TRBC genes, e.g., two or more of the gRNA as described herein; (b) a Cas9 molecule, e.g., a Cas9 molecule as described herein; and optionally, (c) second, third and/or fourth gRNAs that respectively targets the two or more genes selected in (a), e.g., a gRNA, as described herein. In an embodiment, the method further comprises, introducing into a cell of the subject, a governing gRNA molecule, or a nucleic acid that encodes a governing gRNA molecule.

[1400] In an embodiment, the method of treating a subject suffering from cancer comprises altering two or more of FAS, BID, CTLA4, PDCD1, CBLB, PTPN6, TRAC or TRBC genes.

[1401] In an embodiment, the method of treating a subject suffering from cancer comprises altering three or more of FAS, BID, CTLA4, PDCD1, CBLB, PTPN6, TRAC or TRBC genes.

[1402] In an embodiment, the method of treating a subject suffering from cancer comprises altering four or more of FAS, BID, CTLA4, PDCD1, CBLB, PTPN6, TRAC or TRBC genes.

[1403] In an embodiment, the method of treating a subject suffering from cancer comprises altering five or more of FAS, BID, CTLA4, PDCD1, CBLB, PTPN6, TRAC or TRBC genes.

[1404] In an embodiment, the method of treating a subject suffering from cancer comprises altering six or more of FAS, BID, CTLA4, PDCD1, CBLB, PTPN6, TRAC or TRBC genes.

[1405] In an embodiment, the method of treating a subject suffering from cancer comprises altering seven or more of FAS, BID, CTLA4, PDCD1, CBLB, PTPN6, TRAC or TRBC genes.

[1406] In an embodiment, the method of treating a subject suffering from cancer comprises altering each of FAS, BID, CTLA4, PDCD1, CBLB, PTPN6, TRAC or TRBC genes.

[1407] In an embodiment, the method comprises acquiring knowledge of the sequence at a T cell target position in the subject.

[1408] In an embodiment, the method comprises acquiring knowledge of the sequence at a T cell target position in the subject by sequencing one or more of the FAS, BID, CTLA4, PDCD1, CBLB, PTPN6, TRAC or TRBC gene or a portion of one or more of the FAS, BID, CTLA4, PDCD1, CBLB, PTPN6, TRAC or TRBC gene.

[1409] In an embodiment, the method comprises inducing a mutation at a T cell target position in the FAS, BID, CTLA4, PDCD1, CBLB, PTPN6, TRAC or TRBC gene.

[1410] In an embodiment, the method comprises inducing a mutation at a T cell target position in one or more of the FAS, BID, CTLA4, PDCD1, CBLB, PTPN6, TRAC and TRBC genes.

[1411] In an embodiment, the method comprises inducing a mutation at a T cell target position in two or more of the FAS, BID, CTLA4, PDCD1, CBLB, PTPN6, TRAC and TRBC genes.

[1412] In an embodiment, the method comprises inducing a mutation at a T cell target position in three or more of the FAS, BID, CTLA4, PDCD1, CBLB, PTPN6, TRAC and TRBC genes.

[1413] In an embodiment, the method comprises inducing a mutation at a T cell target position in four or more of the FAS, BID, CTLA4, PDCD1, CBLB, PTPN6, TRAC and TRBC genes.

[1414] In an embodiment, the method comprises inducing a mutation at a T cell target position in five or more of the FAS, BID, CTLA4, PDCD1, CBLB, PTPN6, TRAC and TRBC genes.

[1415] In an embodiment, the method comprises inducing a mutation at a T cell target position in six or more of the FAS, BID, CTLA4, PDCD1, CBLB, PTPN6, TRAC and TRBC genes.

[1416] In an embodiment, the method comprises inducing a mutation at a T cell target position in seven or more of the FAS, BID, CTLA4, PDCD1, CBLB, PTPN6, TRAC and TRBC genes.

[1417] In an embodiment, the method comprises inducing a mutation at a T cell target position in each of the FAS, BID, CTLA4, PDCD1, CBLB, PTPN6, TRAC and TRBC genes.

[1418] In an embodiment, the method comprises inducing a mutation at a T cell target position in one or more of the FAS, BID, CTLA4, PDCD1, CBLB, PTPN6, TRAC or TRBC gene by NHEJ.

[1419] In an embodiment, a cell of the subject is contacted ex vivo with (a), (b), and optionally (c). In an embodiment, the cell is returned to the subject's body. In an embodiment, the cell of the subject being contacted ex vivo is a T cell. The T cell may be an engineered T cell, e.g., an engineered CAR (chimeric antigen receptor) T cell or an engineered TCR (T-cell receptor) T cell. A T cell may engineered to express a TCR or a CAR prior to, after, or at the same time as introducing a T cell target position mutation in one or more of the FAS, BID, CTLA4, PDCD1, CBLB, PTPN6, TRAC or TRBC gene.

[1420] When the method comprises (1) inducing a mutation at a T cell target position by NHEJ or (2) knocking down expression of the FAS, BID, CTLA4, PDCD1, CBLB, or PTPN6 gene, e.g., by targeting the promoter region, a Cas9 of (b) and at least one guide RNA, e.g., a guide RNA of (a) are included in the contacting step.

[1421] In another aspect, disclosed herein is a reaction mixture comprising a, gRNA, a nucleic acid, or a composition described herein, and a cell, e.g., a cell from a subject having cancer, or a subject which would benefit from a mutation at a T cell target position.

[1422] In another aspect, disclosed herein is a kit comprising, (a) gRNA molecule described herein, and one or more of the following:

[1423] (b) a Cas9 molecule, e.g., a Cas9 molecule described herein, or a nucleic acid or mRNA that encodes the Cas9;

[1424] (c)(i) a second gRNA molecule, e.g., a second gRNA molecule described herein;

[1425] (c)(ii) a third gRNA molecule, e.g., a second gRNA molecule described herein;

[1426] (c)(iii) a fourth gRNA molecule, e.g., a second gRNA molecule described herein.

[1427] The compositions, reaction mixtures and kits, as disclosed herein, can also include a governing gRNA molecule, e.g., a governing gRNA molecule disclosed herein,

[1428] VI.2 Circulating Blood Cells (e.g., Targeting CCR5 Gene)

[1429] In another aspect, the target cell is a circulating blood cell, e.g., a T cell (e.g., a CD4+ T cell, a CD8+ T cell, a helper T cell, a regulatory T cell, a cytotoxic T cell, a memory T cell, a T cell precursor or a natural killer T cell), a B cell (e.g., a progenitor B cell, a Pre B cell, a Pro B cell, a memory B cell, a plasma B cell), a monocyte, a megakaryocyte, a neutrophil, an eosinophil, a basophil, a mast cell, a reticulocyte, a lymphoid progenitor cell, a myeloid progenitor cell, a gut-associated lymphoid tissue (GALT) cell, a dendritic cell, a macrophage, a microglial cell, or a hematopoietic stem cell. In an embodiment, the target cell is a bone marrow cell, (e.g., a lymphoid progenitor cell, a myeloid progenitor cell, an erythroid progenitor cell, a hematopoietic stem cell, or a mesenchymal stem cell). In an embodiment, the target cell is a CD4+ T cell. In an embodiment, the target cell is a lymphoid progenitor cell (e.g., a common lymphoid progenitor (CLP) cell). In an embodiment, the target cell is a myeloid progenitor cell (e.g. a common myeloid progenitor (CMP) cell). In an embodiment, the target cell is a hematopoietic stem cell (e.g. a long term hematopoietic stem cell (LT-HSC), a short term hematopoietic stem cell (ST-HSC), a multipotent progenitor (MPP) cell, a lineage restricted progenitor (LRP) cell).

[1430] In an embodiment, the target cell is manipulated ex vivo by editing (e.g., introducing a mutation in) the CCR5 target gene and/or modulating the expression of the CCR5 target gene, and administered to the subject. Sources of target cells for ex vivo manipulation may include, by way of example, the subject's blood, the subject's cord blood, or the subject's bone marrow. Sources of target cells for ex vivo manipulation may also include, by way of example, heterologous donor blood, cord blood, or bone marrow.

[1431] In an embodiment, a CD4+T cell is removed from the subject, manipulated ex vivo as described above, and the CD4+T cell is returned to the subject. In an embodiment, a lymphoid progenitor cell is removed from the subject, manipulated ex vivo as described herein, and the lymphoid progenitor cell is returned to the subject. In an embodiment, a myeloid progenitor cell is removed from the subject, manipulated ex vivo as described herein, and the myeloid progenitor cell is returned to the subject. In an embodiment, a hematopoietic stem cell is removed from the subject, manipulated ex vivo as described herein, and the hematopoietic stem cell is returned to the subject.

[1432] A suitable cell can also include a stem cell such as, by way of example, an embryonic stem cell, an induced pluripotent stem cell, a hematopoietic stem cell, a neuronal stem cell and a mesenchymal stem cell. In an embodiment, the cell is an induced pluripotent stem cells (iPS) cell or a cell derived from an iPS cell, e.g., an iPS cell generated from the subject, modified to correct the mutation and differentiated into a clinically relevant cell such as e.g, a CD4+ T cell, a lymphoid progenitor cell, myeloid progenitor cell, a macrophage, dendritic cell, gut associated lymphoid tissue or a hematopoietic stem cell. In an embodiment, AAV is used to transduce the target cells, e.g., the target cells described herein.

[1433] Human Immunodeficiency Virus

[1434] Human Immunodeficiency Virus (HIV) is a virus that causes severe immunodeficiency. In the United States, more than 1 million people are infected with the virus. Worldwide, approximately 30-40 million people are infected.

[1435] HIV is a single-stranded RNA virus that preferentially infects CD4 cells. The virus binds to receptors on the surface of CD4+ cells to enter and infect these cells. This binding and infection step is vital to the pathogenesis of HIV. The virus attaches to the CD4 receptor on the cell surface via its own surface glycoproteins, gp120 and gp41. These proteins are made from the cleavage product of gp160. Gp120 binds to a CD4 receptor and must also bind to another coreceptor in order for the virus to enter the host cell. In macrophage-(M-tropic) viruses, the coreceptor is CCR5 occassionaly referred to as the CCR5 receptor. In thymic-(T-tropic) viruses, the coreceptor is CXCR4. M-tropic virus is found most commonly in the early stages of HIV infection.

[1436] There are two types of HIV-HIV-1 and HIV-2. HIV-1 is the predominant global form and is a more virulent strain of the virus. HIV-2 has lower rates of infection and, at present, predominantly affects populations in West Africa. HIV is transmitted primarily through sexual exposure, although the sharing of needles in intravenous drug use is another mode of transmission.

[1437] As HIV progresses, the virus infects CD4 cells and a subject's CD4 counts fall. With declining CD4 counts, a subject is subject to increasing risk of opportunistic infections (OI). Severely declining CD4 counts are associated with a very high likelihood of OIs, specific cancers (such as Kaposi's sarcoma, Burkitt's lymphoma) and wasting syndrome. Normal CD4 counts are between 600-1200 cells/microliter.

[1438] Untreated HIV is a chronic, progressive disease that leads to acquired immunodeficiency syndrome (AIDS) and death in the vast majority of subjects. Diagnosis of AIDS is made based on infection with a variety of opportunistic pathogens, presence of certain cancers and/or CD4 counts below 200 cells/μL.

[1439] HIV was untreatable and invariably led to death until the late 1980's. Since then, antiretroviral therapy (ART) has dramatically slowed the course of HIV infection. Highly active antiretroviral therapy (HAART) is the use of three or more agents in combination to slow HIV. Antiretroviral therapy (ART) is indicated in a subject whose CD4 counts has dropped below 500 cells/μL. Viral load is the most common measurement of the efficacy of HIV treatment and disease progression. Viral load measures the amount of HIV RNA present in the blood.

[1440] Treatment with HAART has significantly altered the life expectancy of those infected with HIV. A subject in the developed world who maintains their HAART regimen can expect to live into their 60's and possibly 70's. However, HAART regimens are associated with significant, long term side effects. First, the dosing regimens are complex and associated with strict food requirements. Compliance rates with dosing can be lower than 50% in some populations in the United States. In addition, there are significant toxicities associated with HAART treatment, including diabetes, nausea, malaise, sleep disturbances. A subject who does not adhere to dosing requirements of HAART therapy may have return of viral load in their blood and are at risk for progression to disease and its associated complications.

[1441] Methods and compositions described herein provide for a therapy, e.g., a one-time therapy, or a multi-dose therapy, that prevents or treats HIV infection and/or AIDS. In an embodiment, a disclosed therapy prevents the entry of HIV into CD4 cells of a subject who is already infected. While not wishing to be bound by theory, it is believed that knocking out CCR5 on CD4 cells, renders the HIV virus unable to enter CD4 cells. Viral entry into CD4 cells requires interaction of the viral glycoproteins gp41 and gp120 with both the CD4 receptor and the CCR5 coreceptor. Once a functional CCR5 viral receptor has been eliminated from the surface of the CD4 cells, the virus is prevented from binding and entering the host CD4 cells. In an embodiment, the disease does not progress.

[1442] While not wishing to be bound by theory, subjects with naturally occurring CCR5 receptor mutations who have delayed HIV progression may confer protection by the mechanism of action described herein. Subjects with a specific deletion in the CCR5 gene (e.g., the delta 32 deletion) have been shown to have much higher likelihood of being long-term non-progressors (meaning they did not require HAART and their HIV infection did not progress). (See, e.g., Stewart G J et al., 1997 The Australian Long-Term Non-Progressor Study Group. Aids.11:1833-1838.) In addition, a subject who was CCR5+ (had a wild type CCR5 receptor) and infected with HIV underwent a bone marrow transplant for acute myeloid lymphoma. (See, e.g., Hutter G et al., 2009N ENGL J MED. 360:692-698.) The bone marrow transplant (BMT) was from a subject homozygous for a CCR5 delta 32 deletion. Following BMT, the subject did not have progression of HIV and did not require treatment with ART. These subjects offer evidence for the fact that induction of a protective mutation of the CCR5 gene or a knockout of the CCR5 gene prevents, delays or diminishes the ability of HIV to infect the subject. Mutation or deletion of the CCR5 gene should therefore reduce the progression, virulence and pathology of HIV. In an embodiment, a method described herein is used to treat a subject having HIV.

[1443] In an embodiment, a method described herein is used to treat a subject having AIDS.

[1444] In an embodiment, a method described herein is used to prevent HIV infection and AIDS in a subject at high risk for HIV infection.

[1445] In an embodiment, a method described herein is results in a selective advantage to survival of treated CD4 cells. Some proportion of CD4 cells will be modified and have a CCR5 protective mutation. These cells are not be subject to infection with HIV. Cells that were not modified may be infected with HIV and may be expected to undergo cell death. In an embodiment, after the treatment described herein, treated cells survive, while untreated cells should die. This selective advantage should drive eventual colonization in all body compartments with 100% CCR5-negative CD4 cells derived from treated cells, conferring complete protection in treated subjects against infection with M tropic HIV.

[1446] In an embodiment, the method comprises initiating treatment of a subject prior to disease onset.

[1447] In an embodiment, the method comprises initiating treatment of a subject after disease onset.

[1448] In an embodiment, the method comprises initiating treatment of a subject after disease onset, e.g., 1, 2, 3, 4, 5, 6, 7, 8, 9, 10, 12, 24, or 36 months after onset of HIV infection or AIDs. While not wishing to be bound by theory, it is believed that this may be effective as disease progression is slow in some cases and a subject may present well into the course of illness.

[1449] In an embodiment, the method comprises initiating treatment of a subject in an advanced stage of disease, e.g., to slow viral replication and viral load.

[1450] Overall, initiation of treatment for a subject at all stages of disease is expected to prevent or reduce disease progression and benefit a subject.

[1451] In an embodiment, the method comprises initiating treatment of a subject prior to disease onset and prior to infection with HIV.

[1452] In an embodiment, the method comprises initiating treatment of a subject in an early stage of disease, e.g., when when a subject has tested positive for HIV infection but has no signs or symptoms associated with HIV.

[1453] In an embodiment, the method comprises initiating treatment of a patient at the appearance of a reduced CD4 count or a positive HIV test.

[1454] In an embodiment, the method comprises treating a subject considered at risk for developing HIV infection.

[1455] In an embodiment, the method comprises treating a subject who is the spouse, partner, sexual partner, newborn, infant, or child of subject with HIV.

[1456] In an embodiment, the method comprises treating a subject for the prevention of HIV infection.

[1457] In an embodiment, the method comprises treating a subject at the appearance of any of the following findings consistent with HIV: low CD4 count; opportunistic infections associated with HIV, including but not limited to: candidiasis, mycobacterium tuberculosis, cryptococcosis, cryptosporidiosis, cytomegalovirus; and/or malignancy associated with HIV, including but not limited to: lymphoma, Burkitt's lymphoma, Kaposi's sarcoma.

[1458] In an embodiment, a target cell is treated ex vivo and returned to a patient.

[1459] In an embodiment, an autologous CD4 cell can be treated ex vivo and returned to the subject.

[1460] In an embodiment, a heterologous CD4 cell can be treated ex vivo and transplanted into the subject.

[1461] In an embodiment, an autologous stem cell can be treated ex vivo and returned to the subject.

[1462] In an embodiment, a heterologous stem cell can be treated ex vivo and transplanted into the subject.

[1463] Other Embodiments involving Circulating Blood Cells and CCR5 Gene

[1464] In an embodiment, methods and compositions discussed herein, allow for the prevention and treatment of HIV infection and AIDS, by inducing mutations in the gene for CCR5. In an embodiment, methods and compositions discussed can prevent HIV infection and/or prevent the ability for HIV to enter CD4 cells of subjects who are already infected. While not wishing to be bound by theory, by knocking out CCR5 in CD4 cells or inducing a protective mutation (such as a CCR5 delta 32 mutation), entry of the HIV virus into CD4 cells is prevented. Viral entry into CD4 cells requires interaction of the viral glycoproteins gp41 and gp120 with both the CD4 receptor and CCR5, which acts as a co-receptor. If CCR5 is not present on the surface of the CD4 cells, the virus cannot bind and enter the host CD4 cells. The progress of the disease is thus impeded.

[1465] In one aspect, the methods and compositions discussed herein, block a critical aspect of the HIV life cycle, i.e., CCR5-mediated entry into T cells, by NHEJ-mediated inactivation of the CCR5 gene. The mutations, which typically comprise a deletion or insertion (indel) mediated by NHEJ, can take place in any region of the gene, e.g., a promoter region or other non-coding region, or a coding region, so long as the mutation results in loss of the ability to mediate HIV entry into the cell.

[1466] In another aspect, the methods and compositions discussed herein may be used to alter the CCR5 gene to treat or prevent HIV infection or AIDS by targeting the coding sequence of the CCR5 gene. In one embodiment, the gene, e.g., the coding sequence of the CCR5 gene, is targeted to knockout the gene, e.g., to eliminate expression of the gene, e.g., to knockout both alleles of the CCR5 gene, e.g., by induction of an alteration comprising a deletion or mutation in the CCR5 gene. As described herein, a targeted knockout approach is mediated by non-homologous end joining (NHEJ) using a CRISPR/Cas system comprising an enzymatically active Cas9 (eaCas9).

[1467] In another aspect, the methods and compositions discussed herein may be used to alter the CCR5 gene to treat or prevent HIV infection or AIDS by targeting non-coding sequence of the CCR5 gene, e.g., promoter, an enhancer, an intron, 3′UTR, and/or polyadenylation signal. In one embodiment, the gene, e.g., the non-coding sequence of the CCR5 gene, is targeted to knockout the gene, e.g., to eliminate expression of the gene, e.g., to knockout both alleles of the CCR5 gene, e.g., by induction of an alteration comprising a deletion or mutation in the CCR5 gene. In an embodiment, the method provides an alteration that comprises an insertion or deletion.

[1468] In one aspect, disclosed herein is a gRNA molecule, e.g., an isolated or non-naturally occurring gRNA molecule, comprising a targeting domain which is complementary with a target domain from the CCR5 gene.

[1469] In an embodiment, the targeting domain of the gRNA molecule is configured to provide a cleavage event, e.g., a double strand break or a single strand break, sufficiently close to a CCR5 target position in the CCR5 gene to allow alteration, e.g., alteration associated with NHEJ, of a CCR5 target position in the CCR5 gene. In an embodiment the alteration comprises an insertion or deletion. In an embodiment, the targeting domain is configured such that a cleavage event, e.g., a double strand or single strand break, is positioned within 1, 2, 3, 4, 5, 10, 15, 20, 25, 30, 35, 40, 45, 50, 60, 70, 80, 90, 100, 150, 200, 250, 300, 350, 400, 450 or 500 nucleotides of a CCR5 target position. The break, e.g., a double strand or single strand break, can be positioned upstream or downstream of a CCR5 target position in the CCR5 gene.

[1470] In an embodiment, a second gRNA molecule comprising a second targeting domain is configured to provide a cleavage event, e.g., a double strand break or a single strand break, sufficiently close to the CCR5 target position in the CCR5 gene, to allow alteration, e.g., alteration associated with NHEJ, of the CCR5 target position in the CCR5 gene, either alone or in combination with the break positioned by said first gRNA molecule. In an embodiment, the targeting domains of the first and second gRNA molecules are configured such that a cleavage event, e.g., a double strand or single strand break, is positioned, independently for each of the gRNA molecules, within 1, 2, 3, 4, 5, 10, 15, 20, 25, 30, 35, 40, 45, 50, 60, 70, 80, 90, 100, 150, 200, 250, 300, 350, 400, 450 or 500 nucleotides of the target position. In an embodiment, the breaks, e.g., double strand or single strand breaks, are positioned on both sides of a nucleotide of a CCR5 target position in the CCR5 gene. In an embodiment, the breaks, e.g., double strand or single strand breaks, are positioned on one side, e.g., upstream or downstream, of a nucleotide of a CCR5 target position in the CCR5 gene.

[1471] In an embodiment, a single strand break is accompanied by an additional single strand break, positioned by a second gRNA molecule, as discussed below. For example, the targeting domains are configured such that a cleavage event, e.g., the two single strand breaks, are positioned within 1, 2, 3, 4, 5, 10, 15, 20, 25, 30, 35, 40, 45, 50, 60, 70, 80, 90, 100, 150, 200, 250, 300, 350, 400, 450 or 500 nucleotides of a CCR5 target position. In an embodiment, the first and second gRNA molecules are configured such, that when guiding a Cas9 nickase, a single strand break will be accompanied by an additional single strand break, positioned by a second gRNA, sufficiently close to one another to result in alteration of a CCR5 target position in the CCR5 gene. In an embodiment, the first and second gRNA molecules are configured such that a single strand break positioned by said second gRNA is within 10, 20, 30, 40, or 50 nucleotides of the break positioned by said first gRNA molecule, e.g., when the Cas9 is a nickase. In an embodiment, the two gRNA molecules are configured to position cuts at the same position, or within a few nucleotides of one another, on different strands, e.g., essentially mimicking a double strand break.

[1472] In an embodiment, a double strand break can be accompanied by an additional double strand break, positioned by a second gRNA molecule, as is discussed below. For example, the targeting domain of a first gRNA molecule is configured such that a double strand break is positioned upstream of a CCR5 target position in the CCR5 gene, e.g., within 1, 2, 3, 4, 5, 10, 15, 20, 25, 30, 35, 40, 45, 50, 60, 70, 80, 90, 100, 150, 200, 250, 300, 350, 400, 450 or 500 nucleotides of the target position; and the targeting domain of a second gRNA molecule is configured such that a double strand break is positioned downstream of a CCR5 target position in the CCR5 gene, e.g., within 1, 2, 3, 4, 5, 10, 15, 20, 25, 30, 35, 40, 45, 50, 60, 70, 80, 90, 100, 150, 200, 250, 300, 350, 400, 450 or 500 nucleotides of the target position.

[1473] In an embodiment, a double strand break can be accompanied by two additional single strand breaks, positioned by a second gRNA molecule and a third gRNA molecule. For example, the targeting domain of a first gRNA molecule is configured such that a double strand break is positioned upstream of a CCR5 target position in the CCR5 gene, e.g., within 1, 2, 3, 4, 5, 10, 15, 20, 25, 30, 35, 40, 45, 50, 60, 70, 80, 90, 100, 150, 200, 250, 300, 350, 400, 450 or 500 nucleotides of the target position; and the targeting domains of a second and third gRNA molecule are configured such that two single strand breaks are positioned downstream of a CCR5 target position in the CCR5 gene, e.g., within 1, 2, 3, 4, 5, 10, 15, 20, 25, 30, 35, 40, 45, 50, 60, 70, 80, 90, 100, 150, 200, 250, 300, 350, 400, 450 or 500 nucleotides of the target position. In an embodiment, the targeting domain of the first, second and third gRNA molecules are configured such that a cleavage event, e.g., a double strand or single strand break, is positioned, independently for each of the gRNA molecules

[1474] In an embodiment, a first and second single strand breaks can be accompanied by two additional single strand breaks positioned by a third gRNA molecule and a fourth gRNA molecule. For example, the targeting domain of a first and second gRNA molecule are configured such that two single strand breaks are positioned upstream of a CCR5 target position in the CCR5 gene, e.g., within 1, 2, 3, 4, 5, 10, 15, 20, 25, 30, 35, 40, 45, 50, 60, 70, 80, 90, 100, 150, 200, 250, 300, 350, 400, 450 or 500 nucleotides of the target position; and the targeting domains of a third and fourth gRNA molecule are configured such that two single strand breaks are positioned downstream of a CCR5 target position in the CCR5 gene, e.g., within 1, 2, 3, 4, 5, 10, 15, 20, 25, 30, 35, 40, 45, 50, 60, 70, 80, 90, 100, 150, 200, 250, 300, 350, 400, 450 or 500 nucleotides of the target position.

[1475] It is contemplated herein that when multiple gRNAs are used to generate (1) two single stranded breaks in close proximity, (2) two double stranded breaks, e.g., flanking a mutation (e.g., to remove a piece of DNA, e.g., a insertion mutation) or to create more than one indel in an early coding region, (3) one double stranded break and two paired nicks flanking a mutation (e.g., to remove a piece of DNA, e.g., a insertion mutation) or (4) four single stranded breaks, two on each side of a mutation, that they are targeting the same CCR5 target position. It is further contemplated herein that multiple gRNAs may be used to target more than one mutation in the same gene.

[1476] In some embodiments, the targeting domain of the first gRNA molecule and the targeting domain of the second gRNA molecules are complementary to opposite strands of the target nucleic acid molecule. In some embodiments, the gRNA molecule and the second gRNA molecule are configured such that the PAMs are oriented outward.

[1477] In an embodiment, the targeting domain of a gRNA molecule is configured to avoid unwanted target chromosome elements, such as repeat elements, e.g., Alu repeats, in the target domain. The gRNA molecule may be a first, second, third and/or fourth gRNA molecule.

[1478] In an embodiment, the targeting domain of a gRNA molecule is configured to position a cleavage event sufficiently far from a preselected nucleotide, e.g., the nucleotide of a coding region, such that the nucleotide is not be altered. In an embodiment, the targeting domain of a gRNA molecule is configured to position an intronic cleavage event sufficiently far from an intron/exon border, or naturally occurring splice signal, to avoid alteration of the exonic sequence or unwanted splicing events. The gRNA molecule may be a first, second, third and/or fourth gRNA molecule, as described herein.

[1479] In an embodiment, more than one gRNA is used to position breaks, e.g., two single stranded breaks or two double stranded breaks, or a combination of single strand and double strand breaks, e.g., to create one or more indels, in the target nucleic acid sequence.

[1480] In an embodiment, the targeting domain which is complementary with the CCR5 gene is 16 nucleotides or more in length. In an embodiment, the targeting domain is 16 nucleotides in length. In an embodiment, the targeting domain is 17 nucleotides in length. In an embodiment, the targeting domain is 18 nucleotides in length. In an embodiment, the targeting domain is 19 nucleotides in length. In an embodiment, the targeting domain is 20 nucleotides in length. In an embodiment, the targeting domain is 21 nucleotides in length. In an embodiment, the targeting domain is 22 nucleotides in length. In an embodiment, the targeting domain is 23 nucleotides in length. In an embodiment, the targeting domain is 24 nucleotides in length. In an embodiment, the targeting domain is 25 nucleotides in length. In an embodiment, the targeting domain is 26 nucleotides in length.

[1481] In an embodiment, the targeting domain comprises 16 nucleotides. In an embodiment, the targeting domain comprises 17 nucleotides. In an embodiment, the targeting domain comprises 18 nucleotides. In an embodiment, the targeting domain comprises 19 nucleotides. In an embodiment, the targeting domain comprises 20 nucleotides. In an embodiment, the targeting domain comprises 21 nucleotides. In an embodiment, the targeting domain comprises 22 nucleotides. In an embodiment, the targeting domain comprises 23 nucleotides. In an embodiment, the targeting domain comprises 24 nucleotides. In an embodiment, the targeting domain comprises 25 nucleotides. In an embodiment, the targeting domain comprises 26 nucleotides.

[1482] A gRNA as described herein may comprise from 5′ to 3′: a targeting domain (comprising a “core domain”, and optionally a “secondary domain”); a first complementarity domain; a linking domain; a second complementarity domain; a proximal domain; and a tail domain. In some embodiments, the proximal domain and tail domain are taken together as a single domain.

[1483] In an embodiment, a gRNA comprises a linking domain of no more than 25 nucleotides in length; a proximal and tail domain, that taken together, are at least 20 nucleotides in length; and a targeting domain of equal to or greater than 16, 17, 18, 19, 20, 21, 22, 23, 24, 25 or 26 nucleotides in length.

[1484] In another embodiment, a gRNA comprises a linking domain of no more than 25 nucleotides in length; a proximal and tail domain, that taken together, are at least 30 nucleotides in length; and a targeting domain of equal to or greater than 16, 17, 18, 19, 20, 21, 22, 23, 24, 25 or 26 nucleotides in length.

[1485] In another embodiment, a gRNA comprises a linking domain of no more than 25 nucleotides in length; a proximal and tail domain, that taken together, are at least 30 nucleotides in length; and a targeting domain of equal to or greater than 16, 17, 18, 19, 20, 21, 22, 23, 24, 25 or 26 nucleotides in length.

[1486] In another embodiment, a gRNA comprises a linking domain of no more than 25 nucleotides in length; a proximal and tail domain, that taken together, are at least 40 nucleotides in length; and a targeting domain of equal to or greater than 16, 17, 18, 19, 20, 21, 22, 23, 24, 25 or 26 nucleotides in length.

[1487] A cleavage event, e.g., a double strand or single strand break, is generated by a Cas9 molecule. The Cas9 molecule may be an enzymatically active Cas9 (eaCas9) molecule, e.g., an eaCas9 molecule that forms a double strand break in a target nucleic acid or an eaCas9 molecule forms a single strand break in a target nucleic acid (e.g., a nickase molecule).

[1488] In an embodiment, the eaCas9 molecule catalyzes a double strand break.

[1489] In some embodiments, the eaCas9 molecule comprises HNH-like domain cleavage activity but has no, or no significant, N-terminal RuvC-like domain cleavage activity. In this case, the eaCas9 molecule is an HNH-like domain nickase, e.g., the eaCas9 molecule comprises a mutation at D10, e.g., D10A. In other embodiments, the eaCas9 molecule comprises N-terminal RuvC-like domain cleavage activity but has no, or no significant, HNH-like domain cleavage activity. In this instance, the eaCas9 molecule is an N-terminal RuvC-like domain nickase, e.g., the eaCas9 molecule comprises a mutation at H840, e.g., H840A. In an embodiment, the eaCas9 molecule is an N-terminal RuvC-like domain nickase, e.g., the eaCas9 molecule comprises a mutation at N863, e.g., N863A.

[1490] In an embodiment, a single strand break is formed in the strand of the target nucleic acid to which the targeting domain of said gRNA is complementary. In another embodiment, a single strand break is formed in the strand of the target nucleic acid other than the strand to which the targeting domain of said gRNA is complementary.

[1491] In another aspect, disclosed herein is a composition comprising (a) a gRNA molecule comprising a targeting domain that is complementary with a target domain in the CCR5 gene, as described herein. The composition of (a) may further comprise (b) a Cas9 molecule, e.g., a Cas9 molecule as described herein. The Cas9 molecule may be an enzymatically active Cas9 (eaCas9) molecule, e.g., an eaCas9 molecule that forms a double strand break in a target nucleic acid or an eaCas9 molecule forms a single strand break in a target nucleic acid (e.g., a nickase molecule). Alternatively, in some embodiments, the Cas9 molecule may be an enzymatically inactive Cas9 (eiCas9) molecule or a modified eiCas9 molecule, e.g., the eiCas9 molecule is fused to Kruppel-associated box (KRAB) to generate an eiCas9-KRAB fusion protein molecule.

[1492] A composition of (a) and (b) may further comprise (c) a second, third and/or fourth gRNA molecule, e.g., a second, third and/or fourth gRNA molecule described herein. In an embodiment, a composition may comprise at least two gRNA molecules to target two or more of target position on the CCR5 gene. In an embodiment, the composition further comprises a governing gRNA molecule, or a nucleic acid that encodes a governing gRNA molecule.

[1493] In another aspect, disclosed herein is a method of altering a cell, e.g., altering the structure, e.g., altering the sequence, of a target nucleic acid of a cell, comprising contacting said cell with: (a) a gRNA that targets the CCR5 gene, e.g., a gRNA as described herein; (b) a Cas9 molecule, e.g., a Cas9 molecule as described herein; and optionally, (c) a second, third and/or fourth gRNA that targets CCR5 gene, e.g., a gRNA.

[1494] In some embodiments, the method comprises contacting said cell with (a) and (b).

[1495] In some embodiments, the method comprises contacting said cell with (a), (b), and (c).

[1496] In some embodiments, the method comprises contacting a cell from a subject suffering from or likely to develop an HIV infection or AIDS. The cell may be from a subject having a mutation at a CCR5 target position.

[1497] In some embodiments, the method of altering a cell as described herein comprises acquiring knowledge of the presence of a CCR5 target position in said cell, prior to the contacting step. Acquiring knowledge of the presence of a CCR5 target position in the cell may be by sequencing the CCR5 gene, or a portion of the CCR5 gene.

[1498] In an embodiment, contacting comprises delivering to the cell a Cas9 molecule of (b), as a protein or an mRNA, said gRNA of (a), as an RNA, and optionally said second gRNA of (c), as an RNA.

[1499] In an embodiment, contacting comprises delivering to the cell a gRNA of (a) as an RNA, optionally said second gRNA of (c) as an RNA, and a nucleic acid that encodes the Cas9 molecule of (b).

[1500] In another aspect, disclosed herein is a method of treating a subject suffering from or likely to develop an HIV infection or AIDS, e.g., altering the structure, e.g., sequence, of a target nucleic acid of the subject, comprising contacting a cell from the subject with:

[1501] (a) a gRNA that targets the CCR5 gene;

[1502] (b) a Cas9 molecule, e.g., a Cas9 molecule disclosed herein; and

[1503] optionally, (c)(i) a second gRNA that targets the CCR5 gene, and

[1504] further optionally, (c)(ii) a third gRNA, and still further optionally, (c)(iii) a fourth gRNA that target the CCR5 gene.

[1505] In some embodiments, contacting comprises contacting with (a) and (b).

[1506] In some embodiments, contacting comprises contacting with (a), (b), and (c)(i).

[1507] In some embodiments, contacting comprises contacting with (a), (b), (c)(i) and (c)(ii).

[1508] In some embodiments, contacting comprises contacting with (a), (b), (c)(i), (c)(ii) and (c)(iii).

[1509] In an embodiment, the method comprises acquiring knowledge of the presence of a mutation at a CCR5 target position in said subject.

[1510] In an embodiment, the method comprises acquiring knowledge of the presence of a mutation at a CCR5 target position in said subject by sequencing the CCR5 gene or a portion of the CCR5 gene.

[1511] In an embodiment, the method comprises correcting a mutation at a CCR5 target position.

[1512] In an embodiment, the method comprises correcting a mutation at a CCR5 target position by NHEJ.

[1513] When the method comprises inducing a mutation at a CCR5 target position by NHEJ in the coding region or a non-coding region, a Cas9 of (b) and at least one guide RNA (e.g., a guide RNA of (a) are included in the contacting step.

[1514] In an embodiment, a cell of the subject is contacted ex vivo with (a), (b) and optionally (c). In an embodiment, said cell is returned to the subject's body.

[1515] In an embodiment, contacting comprises delivering to said subject said Cas9 molecule of (b), as a protein or mRNA, and a nucleic acid which encodes (a) and optionally (c).

[1516] In an embodiment, contacting comprises delivering to the subject the Cas9 molecule of (b), as a protein or mRNA, the gRNA of (a), as an RNA, and optionally the second gRNA of (c), as an RNA.

[1517] In an embodiment, contacting comprises delivering to the subject the gRNA of (a), as an RNA, optionally said second gRNA of (c), as an RNA, and a nucleic acid that encodes the Cas9 molecule of (b).

[1518] In another aspect, disclosed herein is a reaction mixture comprising a gRNA, a nucleic acid, or a composition described herein, and a cell, e.g., a cell from a subject having, or likely to develop CCR5, or a subject having a mutation at a CCR5 target position

[1519] In another aspect, disclosed herein is a kit comprising, (a) gRNA molecule described herein, and one or more of the following:

[1520] (b) a Cas9 molecule, e.g., a Cas9 molecule described herein, or a nucleic acid or mRNA that encodes the Cas9;

[1521] (c)(i) a second gRNA molecule, e.g., a second gRNA molecule described herein;

[1522] (c)(ii) a third gRNA molecule, e.g., a third gRNA molecule described herein;

[1523] (c)(iii) a fourth gRNA molecule, e.g., a fourth gRNA molecule described herein.

[1524] The compositions, reaction mixtures and kits, as disclosed herein, can also include a governing gRNA molecule, e.g., a governing gRNA molecule disclosed herein.

[1525] VI.3 Circulating Blood Cells (e.g., Targeting HBB or BCL11A Genes for Treating SCD)

[1526] In another aspect, the target cell is a circulating blood cell, e.g., a reticulocyte, a myeloid progenitor cell, or a hematopoietic stem cell. In an embodiment, the target cell is a bone marrow cell (e.g., a myeloid progenitor cell, an erythroid progenitor cell, a hematopoietic stem cell, or a mesenchymal stem cell). In an embodiment, the target cell is a myeloid progenitor cell (e.g. a common myeloid progenitor (CMP) cell). In an embodiment, the target cell is an erythroid progenitor cell (e.g. a megakaryocyte erythroid progenitor (MEP) cell). In an embodiment, the target cell is a hematopoietic stem cell (e.g. a long term hematopoietic stem cell (LT-HSC), a short term hematopoietic stem cell (ST-HSC), a multipotent progenitor (MPP) cell, a lineage restricted progenitor (LRP) cell).

[1527] In an embodiment, the target cell is manipulated ex vivo by editing (e.g., repairing a mutation in) the HBB target gene and/or modulating the expression of the BCL11A target gene, and administered to the subject. Sources of target cells for ex vivo manipulation may include, by way of example, the subject's blood, the subject's cord blood, or the subject's bone marrow. Sources of target cells for ex vivo manipulation may also include, by way of example, heterologous donor blood, cord blood, or bone marrow.

[1528] In an embodiment, a myeloid progenitor cell is removed from the subject, manipulated ex vivo as described above, and the myeloid progenitor cell is returned to the subject. In an embodiment, an erythroid progenitor cell is removed from the subject, manipulated ex vivo as described above, and the erythroid progenitor cell is returned to the subject. In an embodiment, a hematopoietic stem cell is removed from the subject, manipulated ex vivo as described above, and the hematopoietic stem cell is returned to the subject. In an embodiment, a CD34+ hematopoietic stem cell is removed from the subject, manipulated ex vivo as described above, and the CD34+ hematopoietic stem cell is returned to the subject.

[1529] A suitable cell can also include a stem cell such as, by way of example, an embryonic stem cell, an induced pluripotent stem cell, a hematopoietic stem cell, a neuronal stem cell and a mesenchymal stem cell. In an embodiment, the cell is an induced pluripotent stem (iPS) cell or a cell derived from an iPS cell, e.g., an iPS cell generated from the subject, modified to induce a mutation and differentiated into a clinically relevant cell such as a myeloid progenitor cell, an erythroid progenitor cell or a hematopoietic stem cell.

[1530] Cells produced by the methods described herein may be used immediately. Alternatively, the cells may be frozen (e.g., in liquid nitrogen) and stored for later use. The cells will usually be frozen in 10% dimehtylsulfoxide (DMSO), 50% serum, 40% buffered medium, or some other such solution as is commonly used in the art to preserve cells at such freezing temperature and thawed in such a manner as commonly known in the art for thawing frozen cultured cells.

[1531] Methods to Treat or Prevent Sickle Cell Disease (SCD)

[1532] Disclosed herein are approaches to treat or prevent SCD, using the compositions and methods described herein. One approach to treat or prevent SCD is to repair (i.e., correct) one or more mutations in the HBB gene by HDR. In this approach, mutant HBB allele(s) are corrected and restored to wild type state. While not wishing to be bound by theory, it is believed that correction of the glutamic acid to valine substitution at amino acid 6 in the beta-globin gene restores wild type beta-globin production within erythroid cells. The methods described herein can be performed in all cell types. Beta-globin is expressed in cells of erythroid cell lineage. In an embodiment, an erythroid cell is targeted.

[1533] In an embodiment, one HBB allele is repaired in the subject. In another embodiment, both HBB alleles are repaired in the subject. In either situation, the subjects can be cured of disease. As the disease only displays a phenotype when both alleles are mutated, repair of a single allele is adequate for a cure.

[1534] In one approach, the BCL11A gene is targeted as a targeted knockout or knockdown, e.g., to increase expression of fetal hemoglobin.

[1535] While not wishing to be bound by theory, it is considered that increasing levels of fetal hemoglobin (HbF) in subjects with SCD may ameliorate disease. Fetal hemoglobin can replace beta hemoglobin in the hemoglobin complex, form adequate tetramers with alpha hemoglobin, and effectively carry oxygen to tissues. Subjects with SCD who express higher levels of fetal hemoglobin have been found to have a less severe phenotype. Hydroxyurea, often used in the treatment of SCD, may exert its mechanism of action via increasing levels of HbF production.

[1536] In an embodiment, knockout or knockdown of the BCL11A gene increases fetal hemoglobin levels in SCD subjects and improves phenotype and/or reduces or prevents disease progression. BCL11A is a zinc-finger repressor that is involved in the regulation of fetal hemoglobin and acts to repress the synthesis of fetal hemoglobin. Knockout of the BCL11A gene in erythroid cells induces increased fetal hemoglobin (HbF) synthesis and increased HbF can result in more effective oxygen carrying capacity in subjects with SCD (HbF will form tetramers with hemoglobin alpha).

[1537] In an embodiment, the BCL11A knockout or knockdown is targeted specifically to cells of the erythroid lineage. BCL11A knockout in erythroid cells has been found in in vitro studies to have no effect on erythroid growth, maturation and function. In an embodiment, erythroid cells are preferentially targeted, e.g., at least 90%, 95%, 96%, 97%, 98%, 99%, or 100% of the targeted cells are erythroid cells. For example, if cells are treated ex vivo and returned to the subject, erythroid cells are preferentially modified.

[1538] In an embodiment, the methods described herein result in increased fetal hemoglobin synthesis in SCD subjects, thereby improving disease phenotype in subjects with SCD. For example, subjects with SCD will suffer from less severe anemia and will need fewer blood transfusions. They will therefore have fewer complications arising from transfusions and chelation therapy. In an embodiment, the method described herein increases fetal hemoglobin synthesis and improves the oxygen carrying capacity of erythroid cells. For example, subjects are expected to demonstrate decreased rates of extramedullary erythropoiesis and decreased erythroid hypertrophy within the bone marrow. In an embodiment, the method described herein results in reduction of bone fractures, bone abnormalities, splenomegaly, and thrombosis.

[1539] Knockdown or knockout of one or both BCL11A alleles may be performed prior to disease onset or after disease onset, but preferably early in the disease course.

[1540] In an embodiment, the method comprises initiating treatment of a subject prior to disease onset.

[1541] In an embodiment, the method comprises initiating treatment of a subject after disease onset.

[1542] In an embodiment, the method comprises initiating treatment of a subject well after disease onset, e.g., 1, 2, 3, 4, 5, 6, 7, 8, 9, 10, 12, 24, or 36 months after onset of SCD. While not wishing to be bound by theory it is believed that this treatment may be effective if subjects present well into the course of illness.

[1543] In an embodiment, the method comprises initiating treatment of a subject in an advanced stage of disease.

[1544] Overall, initiation of treatment for subjects at all stages of disease is expected to prevent negative consequences of disease and be of benefit to subjects.

[1545] In an embodiment, the method comprises initiating treatment of a subject prior to disease expression. In an embodiment, the method comprises initiating treatment of a subject in an early stage of disease, e.g., when a subject has tested positive for SCD mutations but has no signs or symptoms associated with SCD.

[1546] In an embodiment, the method comprises initiating treatment of a subject who is transfusion-dependent.

[1547] In an embodiment, a cell is treated, e.g., ex vivo. In an embodiment, an ex vivo treated cell is returned to a subject.

[1548] In an embodiment, allogenic or autologous bone marrow or erythroid cells are treated ex vivo. In an embodiment, an ex vivo treated allogenic or autologous bone marrow or erythroid cells are administered to the subject. In an embodiment, an erythroid cell, e.g., an autologous erythroid cell, is treated ex vivo and returned to the subject. In an embodiment, an autologous stem cell, is treated ex vivo and returned to the subject. In an embodiment, the modified HSCs are administered to the patient following no myeloablative pre-conditioning. In an embodiment, the modified HSCs are administered to the patient following mild myeloablative pre-conditioning such that following engraftment, some of the hematopoietic cells are devied from the modified HSCs. In other aspects, the HSCs are administered after full myeloablation such that following engraftment, 100% of the hematopoietic cells are derived from the modified HSCs.

[1549] Methods of Repairing Mutation(s) in the HBB Gene

[1550] One approach to treat or prevent SCD is to repair (i.e., correct) one or more mutations in the HBB gene, e.g., by HDR. In this approach, mutant HBB allele(s) are corrected and restored to wild type state. While not wishing to be bound by theory, it is believed that correction of the glutamic acid to valine substitution at amino acid 6 in the beta-globin gene restores wild type beta-globin production within erythroid cells. The method described herein can be performed in all cell types. Beta-globin is expressed in cells of erythroid cell lineage. In an embodiment, an erythroid cell is targeted.

[1551] In an embodiment, one HBB allele is repaired in the subject. In another embodiment, both HBB alleles are repaired in the subject. In either situation, the subjects can be cured of disease. As the disease only displays a phenotype when both alleles are mutated, repair of a single allele is adequate for a cure.

[1552] In one aspect, methods and compositions discussed herein, provide for the correction of the underlying genetic cause of SCD, e.g., the correction of a mutation at a target position in the HBB gene, e.g., correction of a mutation at amino acid position 6, e.g., an E6V substitution in the HBB gene.

[1553] In an embodiment, the method provides for the correction of a mutation at a target position in the HBB gene, e.g., correction of a mutation at amino acid position 6, e.g., an E6V substitution in the HBB gene. As described herein, in one embodiment, the method comprises the introduction of one or more breaks (e.g., single strand breaks or double strand breaks) sufficiently close to (e.g., either 5′ or 3′ to) the target position in the HBB gene, e.g., E6V.

[1554] In an embodiment, the targeting domain of the gRNA molecule is configured to provide a cleavage event, e.g., a double strand break or a single strand break, sufficiently close to (e.g., either 5′ or 3′ to) the target position in the HBB gene, e.g., E6V to allow correction, e.g., alteration in the HBB gene, e.g., associated with HDR. In an embodiment, the targeting domain is configured such that a cleavage event, e.g., a double strand or single strand break, is positioned within 1, 2, 3, 4, 5, 10, 15, 20, 25, 30, 35, 40, 45, 50, 60, 70, 80, 90, 100, 150, 200, 250, 300, 350, 400, 450 or 500 nucleotides of the target position in the HBB gene, e.g., E6V. The break, e.g., a double strand or single strand break, can be positioned upstream or downstream of the target position in the HBB gene, e.g., E6V.

[1555] In an embodiment, a second gRNA molecule is configured to provide a cleavage event, e.g., a double strand break or a single strand break, sufficiently close to (e.g., either 5′ or 3′ to) the target position in the HBB gene, e.g., E6V to allow correction, e.g., alteration associated with HDR in the HBB gene. In an embodiment, the targeting domain is configured such that a cleavage event, e.g., a double strand or single strand break, is positioned within 1, 2, 3, 4, 5, 10, 15, 20, 25, 30, 35, 40, 45, 50, 60, 70, 80, 90, 100, 150, 200, 250, 300, 350, 400, 450 or 500 nucleotides of the target position in the HBB gene, e.g., E6V. The break, e.g., a double strand or single strand break, can be positioned upstream or downstream of the target position in the HBB gene, e.g., E6V.

[1556] In an embodiment, a single strand break is accompanied by an additional single strand break, positioned by a second gRNA molecule, as discussed below. For example, the targeting domains are configured such that a cleavage event, e.g., the two single strand breaks, are positioned within 1, 2, 3, 4, 5, 10, 15, 20, 25, 30, 35, 40, 45, 50, 60, 70, 80, 90, 100, 150, 200, 250, 300, 350, 400, 450 or 500 nucleotides of the target position in the HBB gene, e.g., E6V. In an embodiment, the first and second gRNA molecules are configured such, that when guiding a Cas9 nickase, a single strand break will be accompanied by an additional single strand break, positioned by a second gRNA, sufficiently close to one another to result in alteration of the target position in the HBB gene, e.g., E6V. In an embodiment, the first and second gRNA molecules are configured such that a single strand break positioned by said second gRNA is within 10, 20, 30, 40, or 50 nucleotides of the break positioned by said first gRNA molecule, e.g., when the Cas9 is a nickase. In an embodiment, the two gRNA molecules are configured to position cuts at the same position, or within a few nucleotides of one another, on different strands, e.g., essentially mimicking a double strand break.

[1557] In an embodiment, a double strand break can be accompanied by an additional double strand break, positioned by a second gRNA molecule, as is discussed below. For example, the targeting domain of a first gRNA molecule is configured such that a double strand break is positioned upstream of the target position in the HBB gene, e.g., E6V, e.g., within 1, 2, 3, 4, 5, 10, 15, 20, 25, 30, 35, 40, 45, 50, 60, 70, 80, 90, 100, 150, 200, 250, 300, 350, 400, 450 or 500 nucleotides of the target position; and the targeting domain of a second gRNA molecule is configured such that a double strand break is positioned downstream the target position in the HBB gene, e.g., E6V, e.g., within 1, 2, 3, 4, 5, 10, 15, 20, 25, 30, 35, 40, 45, 50, 60, 70, 80, 90, 100, 150, 200, 250, 300, 350, 400, 450 or 500 nucleotides of the target position.

[1558] In an embodiment, a double strand break can be accompanied by two additional single strand breaks, positioned by a second gRNA molecule and a third gRNA molecule. For example, the targeting domain of a first gRNA molecule is configured such that a double strand break is positioned upstream of the target position in the HBB gene, e.g., E6V, e.g., within 1, 2, 3, 4, 5, 10, 15, 20, 25, 30, 35, 40, 45, 50, 60, 70, 80, 90, 100, 150, 200, 250, 300, 350, 400, 450 or 500 nucleotides of the target position; and the targeting domains of a second and third gRNA molecule are configured such that two single strand breaks are positioned downstream of the target position in the HBB gene, e.g., E6V, e.g., within 1, 2, 3, 4, 5, 10, 15, 20, 25, 30, 35, 40, 45, 50, 60, 70, 80, 90, 100, 150, 200, 250, 300, 350, 400, 450 or 500 nucleotides of the target position. In an embodiment, the targeting domain of the first, second and third gRNA molecules are configured such that a cleavage event, e.g., a double strand or single strand break, is positioned, independently for each of the gRNA molecules.

[1559] In an embodiment, a first and second single strand breaks can be accompanied by two additional single strand breaks positioned by a third gRNA molecule and a fourth gRNA molecule. For example, the targeting domain of a first and second gRNA molecule are configured such that two single strand breaks are positioned upstream of the target position in the HBB gene, e.g., E6V, e.g., within 1, 2, 3, 4, 5, 10, 15, 20, 25, 30, 35, 40, 45, 50, 60, 70, 80, 90, 100, 150, 200, 250, 300, 350, 400, 450 or 500 nucleotides of the target position in the HBB gene, e.g., E6V; and the targeting domains of a third and fourth gRNA molecule are configured such that two single strand breaks are positioned downstream of the target position in the HBB gene, e.g., E6V, e.g., within 1, 2, 3, 4, 5, 10, 15, 20, 25, 30, 35, 40, 45, 50, 60, 70, 80, 90, 100, 150, 200, 250, 300, 350, 400, 450 or 500 nucleotides of the target position in the HBB gene, e.g., E6V.

[1560] In an embodiment, a mutation in the HBB gene, e.g., E6V is corrected using an exogenously provided template nucleic acid, e.g., by HDR.

[1561] In another embodiment, a mutation in the HBB gene, e.g., E6V is corrected without using an exogenously provided template nucleic acid, e.g., by HDR. In an embodiment, alteration of the target sequence occurs with an endogenous genomic donor sequence, e.g., by HDR. In an embodiment, the endogenous genomic donor sequence comprises one or more nucleotides derived from the HBB gene. In an embodiment, a mutation in the HBB gene, e.g., E6V is corrected by an endogenous genomic donor sequence (e.g., an HBB gene).

[1562] Methods of Altering BCL11A

[1563] One approach to increase the expression of HbF involves identification of genes whose products play a role in the regulation of globin gene expression. One such gene is BCL11A. It plays a role in the regulation of γ globin expression. It was first identified because of its role in lymphocyte development. BCL11A encodes a zinc finger protein that is thought to be involved in the stage specific regulation of γ globin expression. BCL11A is expressed in adult erythroid precursor cells and down-regulation of its expression leads to an increase in γ globin expression. In addition, it appears that the splicing of the BCL11A mRNA is developmentally regulated. In embryonic cells, it appears that the shorter BCL11A mRNA variants, known as BCL11A-S and BCL11A-XS are primary expressed, while in adult cells, the longer BCL11A-L and BCL11A-XL mRNA variants are predominantly expressed. See, Sankaran et al (2008) Science 322 p. 1839. The BCL11A protein appears to interact with the β globin locus to alter its conformation and thus its expression at different developmental stages. Thus, if BCL11A expression is altered e.g., disrupted (e.g., reduced or eliminated), it results in the elevation of γ globin and HbF production.

[1564] Disclosed herein are methods for altering the SCD target position in the BCL11A gene.

[1565] Altering the SCD target position is achieved, e.g., by:

[1566] (1) knocking out the BCL11A gene:
[1567] (a) insertion or deletion (e.g., NHEJ-mediated insertion or deletion) of one or more nucleotides in close proximity to or within the early coding region of the BCL11A gene, or
[1568] (b) deletion (e.g., NHEJ-mediated deletion) of a genomic sequence including the erythroid enhancer of the BCL11A gene, or

[1569] (2) knocking down the BCL11A gene mediated by enzymatically inactive Cas9 (eiCas9) or an eiCas9-fusion protein by targeting the promoter region of the gene.

[1570] All approaches give rise to alteration of the BCL11A gene.

[1571] In one embodiment, methods described herein introduce one or more breaks near the early coding region in at least one allele of the BCL11A gene. In another embodiment, methods described herein introduce two or more breaks to flank the erythroid enhancer of SCD target knockout position. The two or more breaks remove (e.g., delete) genomic sequence including the erythorid enhancer. In another embodiment, methods described herein comprises knocking down the BCL11A gene mediated by enzymatically inactive Cas9 (eiCas9) or an eiCas9-fusion protein by targeting the promoter region of SCD target knockdown position. All methods described herein result in alteration of the BCL11A gene.

[1572] NHEJ-Mediated Introduction of an Indel in Close Proximity to or within the Early Coding Region of the SCD Knockout Position

[1573] In an embodiment, the method comprises introducing an NHEJ-mediated insertion or deletion of one more nucleotides in close proximity to the SCD target knockout position (e.g., the early coding region) of the BCL11A gene. As described herein, in one embodiment, the method comprises the introduction of one or more breaks (e.g., single strand breaks or double strand breaks) sufficiently close to (e.g., either 5′ or 3′ to) the early coding region of the SCD target knockout position, such that the break-induced indel could be reasonably expected to span the SCD target knockout position (e.g., the early coding region). While not wishing to be bound by theory, it is believed that NHEJ-mediated repair of the break(s) allows for the NHEJ-mediated introduction of an indel in close proximity to within the early coding region of the SCD target knockout position.

[1574] In an embodiment, the targeting domain of the gRNA molecule is configured to provide a cleavage event, e.g., a double strand break or a single strand break, sufficiently close to the early coding region in the BCL11A gene to allow alteration, e.g., alteration associated with NHEJ in the BCL11A gene. In an embodiment, the targeting domain is configured such that a cleavage event, e.g., a double strand or single strand break, is positioned within 1, 2, 3, 4, 5, 10, 15, 20, 25, 30, 35, 40, 45, 50, 60, 70, 80, 90, 100, 150, 200, 250, 300, 350, 400, 450 or 500 nucleotides of a SCD target knockout position. The break, e.g., a double strand or single strand break, can be positioned upstream or downstream of a SCD target knockout position in the BCL11A gene.

[1575] In an embodiment, a second gRNA molecule comprising a second targeting domain is configured to provide a cleavage event, e.g., a double strand break or a single strand break, sufficiently close to the early coding region in the BCL11A gene, to allow alteration, e.g., alteration associated with NHEJ in the BCL11A gene, either alone or in combination with the break positioned by said first gRNA molecule. In an embodiment, the targeting domains of the first and second gRNA molecules are configured such that a cleavage event, e.g., a double strand or single strand break, is positioned, independently for each of the gRNA molecules, within 1, 2, 3, 4, 5, 10, 15, 20, 25, 30, 35, 40, 45, 50, 60, 70, 80, 90, 100, 150, 200, 250, 300, 350, 400, 450 or 500 nucleotides of the target position. In an embodiment, the breaks, e.g., double strand or single strand breaks, are positioned on both sides of a nucleotide of a SCD target knockout position in the BCL11A gene. In an embodiment, the breaks, e.g., double strand or single strand breaks, are positioned on one side, e.g., upstream or downstream, of a nucleotide of a SCD target knockout position in the BCL11A gene.

[1576] In an embodiment, a single strand break is accompanied by an additional single strand break, positioned by a second gRNA molecule, as discussed below. For example, the targeting domains are configured such that a cleavage event, e.g., the two single strand breaks, are positioned within 1, 2, 3, 4, 5, 10, 15, 20, 25, 30, 35, 40, 45, 50, 60, 70, 80, 90, 100, 150, 200, 250, 300, 350, 400, 450 or 500 nucleotides of the early coding region in the BCL11A gene. In an embodiment, the first and second gRNA molecules are configured such, that when guiding a Cas9 nickase, a single strand break will be accompanied by an additional single strand break, positioned by a second gRNA, sufficiently close to one another to result in alteration of the early coding region in the BCL11A gene in the BCL11A gene. In an embodiment, the first and second gRNA molecules are configured such that a single strand break positioned by said second gRNA is within 10, 20, 30, 40, or 50 nucleotides of the break positioned by said first gRNA molecule, e.g., when the Cas9 is a nickase. In an embodiment, the two gRNA molecules are configured to position cuts at the same position, or within a few nucleotides of one another, on different strands, e.g., essentially mimicking a double strand break.

[1577] In an embodiment, a double strand break can be accompanied by an additional double strand break, positioned by a second gRNA molecule, as is discussed below. For example, the targeting domain of a first gRNA molecule is configured such that a double strand break is positioned upstream of the early coding region in the BCL11A gene, e.g., within 1, 2, 3, 4, 5, 10, 15, 20, 25, 30, 35, 40, 45, 50, 60, 70, 80, 90, 100, 150, 200, 250, 300, 350, 400, 450 or 500 nucleotides of the target position; and the targeting domain of a second gRNA molecule is configured such that a double strand break is positioned downstream of the early coding region in the BCL11A gene in the BCL11A gene, e.g., within 1, 2, 3, 4, 5, 10, 15, 20, 25, 30, 35, 40, 45, 50, 60, 70, 80, 90, 100, 150, 200, 250, 300, 350, 400, 450 or 500 nucleotides of the target position.

[1578] In an embodiment, a double strand break can be accompanied by two additional single strand breaks, positioned by a second gRNA molecule and a third gRNA molecule. For example, the targeting domain of a first gRNA molecule is configured such that a double strand break is positioned upstream of the early coding region in the BCL11A gene, e.g., within 1, 2, 3, 4, 5, 10, 15, 20, 25, 30, 35, 40, 45, 50, 60, 70, 80, 90, 100, 150, 200, 250, 300, 350, 400, 450 or 500 nucleotides of the target position; and the targeting domains of a second and third gRNA molecule are configured such that two single strand breaks are positioned downstream of the early coding region in the BCL11A gene, e.g., within 1, 2, 3, 4, 5, 10, 15, 20, 25, 30, 35, 40, 45, 50, 60, 70, 80, 90, 100, 150, 200, 250, 300, 350, 400, 450 or 500 nucleotides of the target position. In an embodiment, the targeting domain of the first, second and third gRNA molecules are configured such that a cleavage event, e.g., a double strand or single strand break, is positioned, independently for each of the gRNA molecules.

[1579] In an embodiment, a first and second single strand breaks can be accompanied by two additional single strand breaks positioned by a third gRNA molecule and a fourth gRNA molecule. For example, the targeting domain of a first and second gRNA molecule are configured such that two single strand breaks are positioned upstream of the early coding region in the BCL11A gene, e.g., within 1, 2, 3, 4, 5, 10, 15, 20, 25, 30, 35, 40, 45, 50, 60, 70, 80, 90, 100, 150, 200, 250, 300, 350, 400, 450 or 500 nucleotides of the early coding region in the BCL11A gene; and the targeting domains of a third and fourth gRNA molecule are configured such that two single strand breaks are positioned downstream of a SCD target knockout position in the BCL11A gene the early coding region in the BCL11A gene, e.g., within 1, 2, 3, 4, 5, 10, 15, 20, 25, 30, 35, 40, 45, 50, 60, 70, 80, 90, 100, 150, 200, 250, 300, 350, 400, 450 or 500 nucleotides of the early coding region in the BCL11A gene.

[1580] NHEJ-Mediated Deletion of the Erythroid Enhancer at the SCD Target Position

[1581] In an embodiment, the method comprises introducing a NHEJ-mediated deletion of a genomic sequence including the erythroid enhancer. As described herein, in one embodiment, the method comprises the introduction of two double strand breaks—one 5′ and the other 3′ to (i.e., flanking) the SCD target position (e.g., the erythroid enhancer). Two gRNAs, e.g., unimolecular (or chimeric) or modular gRNA molecules, are configured to position the two double strand breaks on opposite sides of the SCD target knockdown position (e.g., the erythroid enhancer) in the BCL11A gene. In an embodiment, the first double strand break is positioned upstream of the erythroid enhancer within intron 2 (e.g., between TSS+0.75 kb to TSS+52.0 kb), and the second double strand break is positioned downstream of the erythroid enhancer within intron 2 (e.g., between TSS+64.4 kb to TSS+84.7 kb) (see FIG. 15). In an embodiment, the two double strand breaks are positioned to remove a portion of the erythroid enhancer resulting in disruption of one or more DHSs. In an embodiment, the breaks (i.e., the two double strand breaks) are positioned to avoid unwanted target chromosome elements, such as repeat elements, e.g., an Alu repeat, or the endogenous splice sites.

[1582] The first double strand break may be positioned as follows:
[1583] (1) upstream of the 5′ end of the erythroid enhancer in intron 2 (e.g., between TSS+0.75 kb to TSS+52.0 kb), or
[1584] (2) within the erythroid enhancer provided that a portion of the erythroid enhancer is removed resulting in disruption of one or more DHSs (e.g., between TSS+52.0 kb to TSS+64.4 kb),
   and the second double strand break to be paired with the first double strand break may be positioned as follows:
[1585] (1) downstream the 3′ end of the erythroid enhancer in intron 2 (e.g., between TSS+64.4 kb to TSS+84.7 kb), or
[1586] (2) within the erythroid enhancer provided that a portion of the erythroid enhancer is removed resulting in disruption of one or more DHSs (e.g., between TSS+52.0 kb to TSS+64.4 kb).

[1587] For example, the first double strand break may be positioned in the BCL11A gene:

[1588] (1) between TSS+0.75 kb to TSS+10 kb,

[1589] (2) between TSS+10 kb to TSS+20 kb,

[1590] (3) between TSS+20 kb to TSS+30 kb,

[1591] (4) between TSS+30 kb to TSS+40 kb,

[1592] (5) between TSS+40 kb to TSS+45 kb,

[1593] (6) between TSS+45 kb to TSS+47.5 kb,

[1594] (7) between TSS+47.5 kb to TSS+50 kb,

[1595] (8) between TSS+50 kb to TSS+51 kb,

[1596] (9) between TSS+51 kb to TSS+51.1 kb,

[1597] (10) between TSS+51.1 kb to TSS+51.2 kb,

[1598] (11) between TSS+51.2 kb to TSS+51.3 kb,

[1599] (12) between TSS+51.3 kb to TSS+51.4 kb,

[1600] (13) between TSS+51.4 kb to TSS+51.5 kb,

[1601] (14) between TSS+51.5 kb to TSS+51.6 kb,

[1602] (15) between TSS+51.6 kb to TSS+51.7 kb,

[1603] (16) between TSS+51.7 kb to TSS+51.8 kb,

[1604] (17) between TSS+51.8 kb to TSS+51.9 kb,

[1605] (18) between TSS+51.9 kb to TSS+52 kb,

[1606] (19) between TSS+52 kb to TSS+53 kb,

[1607] (20) between TSS+53 kb to TSS+54 kb,

[1608] (21) between TSS+54 kb to TSS+55 kb,

[1609] (22) between TSS+55 kb to TSS+56 kb,

[1610] (23) between TSS+56 kb to TSS+57 kb,

[1611] (24) between TSS+57 kb to TSS+58 kb,

[1612] (25) between TSS+58 kb to TSS+59 kb,

[1613] (26) between TSS+59 kb to TSS+60 kb,

[1614] (27) between TSS+60 kb to TSS+61 kb,

[1615] (28) between TSS+61 kb to TSS+62 kb,

[1616] (29) between TSS+62 kb to TSS+63 kb,

[1617] (30) between TSS+63 kb to TSS+64 kb, or

[1618] (31) between TSS+64 kb to TSS+64.4 kb,

and the second double strand break to be paired with the first double strand break may be positioned in the BCL11A gene:

[1619] (1) between TSS+52 kb to TSS+53 kb,

[1620] (2) between TSS+53 kb to TSS+54 kb,

[1621] (3) between TSS+54 kb to TSS+55 kb,

[1622] (4) between TSS+55 kb to TSS+56 kb,

[1623] (5) between TSS+56 kb to TSS+57 kb,

[1624] (6) between TSS+57 kb to TSS+58 kb,

[1625] (7) between TSS+58 kb to TSS+59 kb,

[1626] (8) between TSS+59 kb to TSS+60 kb,

[1627] (9) between TSS+60 kb to TSS+61 kb,

[1628] (10) between TSS+61 kb to TSS+62 kb,

[1629] (11) between TSS+62 kb to TSS+63 kb,

[1630] (12) between TSS+63 kb to TSS+64 kb,

[1631] (13) between TSS+64 kb to TSS+64.4 kb,

[1632] (14) between TSS+64.4 kb to TSS+65 kb,

[1633] (15) between TSS+65 kb to TSS+65.1 kb,

[1634] (16) between TSS+65.1 kb to TSS+65.2 kb,

[1635] (17) between TSS+65.2 kb to TSS+65.3 kb,

[1636] (18) between TSS+65.3 kb to TSS+65.4 kb,

[1637] (19) between TSS+65.4 kb to TSS+65.5 kb,

[1638] (20) between TSS+65.5 kb to TSS+65.7 kb,

[1639] (21) between TSS+65.7 kb to TSS+65.8 kb,

[1640] (22) between TSS+65.8 kb to TSS+65.9 kb,

[1641] (23) between TSS+65.9 kb to TSS+66 kb,

[1642] (24) between TSS+66 kb to TSS+67 kb,

[1643] (25) between TSS+67 kb to TSS+68 kb,

[1644] (26) between TSS+68 kb to TSS+69 kb,

[1645] (27) between TSS+69 kb to TSS+70 kb,

[1646] (28) between TSS+70 kb to TSS+75 kb,

[1647] (29) between TSS+75 kb to TSS+80 kb, or

[1648] (30) between TSS+80 kb to TSS+84.4 kb.

[1649] While not wishing to be bound by theory, it is believed that the two double strand breaks allow for NHEJ-mediated deletion of erythroid enhancer in the BCL11A gene.

[1650] In an embodiment, the method comprises introducing a NHEJ-mediated deletion of a genomic sequence including the erythroid enhancer. As described herein, in one embodiment, the method comprises the introduction of two sets of breaks (e.g., one double strand break and a pair of single strand breaks)—one 5′ and the other 3′ to (i.e., flanking) the SCD target position (e.g., the erythroid enhancer). Two gRNAs, e.g., unimolecular (or chimeric) or modular gRNA molecules, are configured to position the two sets of breaks (either the double strand break or the pair of single strand breaks) on opposite sides of the SCD target knockdown position (e.g., the erythroid enhancer) in the BCL11A gene. In an embodiment, the first set of breaks (either the double strand break or the pair of single strand breaks) is positioned upstream of the erythroid enhancer within intron 2 (e.g., between TSS+0.75 kb to TSS+52.0 kb), and the second set of breaks (either the double strand break or the pair of single strand breaks) is positioned downstream of the erythroid enhancer within intron 2 (e.g., between TSS+64.4 kb to TSS+84.7 kb) (see FIG. 15). In an embodiment, the two sets of breaks (either the double strand break or the pair of single strand breaks) are positioned to remove a portion of the erythroid enhancer resulting in disruption of one or more DHSs. In an embodiment, the breaks (i.e., the two sets of breaks (either the double strand break or the pair of single strand breaks)) are positioned to avoid unwanted target chromosome elements, such as repeat elements, e.g., an Alu repeat, or the endogenous splice sites.

[1651] The first set of breaks (either the double strand break or the pair of single strand breaks) may be positioned as follows:
[1652] (1) upstream of the 5′ end of the erythroid enhancer in intron 2 (e.g., between TSS+0.75 kb to TSS+52.0 kb), or
[1653] (2) within the erythroid enhancer provided that a portion of the erythroid enhancer is removed resulting in disruption of one or more DHSs (e.g., between TSS+52.0 kb to TSS+64.4 kb),
   and the second set of breaks (either the double strand break or the pair of single strand breaks) to be paired with the first set of breaks (either the double strand break or the pair of single strand breaks) may be positioned as follows:
[1654] (1) downstream the 3′ end of the erythroid enhancer in intron 2 (e.g., between TSS+64.4 kb to TSS+84.7 kb), or
[1655] (2) within the erythroid enhancer provided that a portion of the erythroid enhancer is removed resulting in disruption of one or more DHSs (e.g., between TSS+52.0 kb to TSS+64.4 kb).

[1656] For example, the first set of breaks (either the double strand break or the pair of single strand breaks) may be positioned in the BCL11A gene:

[1657] (1) between TSS+0.75 kb to TSS+10 kb,

[1658] (2) between TSS+10 kb to TSS+20 kb,

[1659] (3) between TSS+20 kb to TSS+30 kb,

[1660] (4) between TSS+30 kb to TSS+40 kb,

[1661] (5) between TSS+40 kb to TSS+45 kb,

[1662] (6) between TSS+45 kb to TSS+47.5 kb,

[1663] (7) between TSS+47.5 kb to TSS+50 kb,

[1664] (8) between TSS+50 kb to TSS+51 kb,

[1665] (9) between TSS+51 kb to TSS+51.1 kb,

[1666] (10) between TSS+51.1 kb to TSS+51.2 kb,

[1667] (11) between TSS+51.2 kb to TSS+51.3 kb,

[1668] (12) between TSS+51.3 kb to TSS+51.4 kb,

[1669] (13) between TSS+51.4 kb to TSS+51.5 kb,

[1670] (14) between TSS+51.5 kb to TSS+51.6 kb,

[1671] (15) between TSS+51.6 kb to TSS+51.7 kb,

[1672] (16) between TSS+51.7 kb to TSS+51.8 kb,

[1673] (17) between TSS+51.8 kb to TSS+51.9 kb,

[1674] (18) between TSS+51.9 kb to TSS+52 kb,

[1675] (19) between TSS+52 kb to TSS+53 kb,

[1676] (20) between TSS+53 kb to TSS+54 kb,

[1677] (21) between TSS+54 kb to TSS+55 kb,

[1678] (22) between TSS+55 kb to TSS+56 kb,

[1679] (23) between TSS+56 kb to TSS+57 kb,

[1680] (24) between TSS+57 kb to TSS+58 kb,

[1681] (25) between TSS+58 kb to TSS+59 kb,

[1682] (26) between TSS+59 kb to TSS+60 kb,

[1683] (27) between TSS+60 kb to TSS+61 kb,

[1684] (28) between TSS+61 kb to TSS+62 kb,

[1685] (29) between TSS+62 kb to TSS+63 kb,

[1686] (30) between TSS+63 kb to TSS+64 kb, or

[1687] (31) between TSS+64 kb to TSS+64.4 kb,

and the second set of breaks (either the double strand break or the pair of single strand breaks) to be paired with the first set of breaks (either the double strand break or the pair of single strand breaks)may be positioned in the BCL11A gene:

[1688] (1) between TSS+52 kb to TSS+53 kb,

[1689] (2) between TSS+53 kb to TSS+54 kb,

[1690] (3) between TSS+54 kb to TSS+55 kb,

[1691] (4) between TSS+55 kb to TSS+56 kb,

[1692] (5) between TSS+56 kb to TSS+57 kb,

[1693] (6) between TSS+57 kb to TSS+58 kb,

[1694] (7) between TSS+58 kb to TSS+59 kb,

[1695] (8) between TSS+59 kb to TSS+60 kb,

[1696] (9) between TSS+60 kb to TSS+61 kb,

[1697] (10) between TSS+61 kb to TSS+62 kb,

[1698] (11) between TSS+62 kb to TSS+63 kb,

[1699] (12) between TSS+63 kb to TSS+64 kb,

[1700] (13) between TSS+64 kb to TSS+64.4 kb,

[1701] (14) between TSS+64.4 kb to TSS+65 kb,

[1702] (15) between TSS+65 kb to TSS+65.1 kb,

[1703] (16) between TSS+65.1 kb to TSS+65.2 kb,

[1704] (17) between TSS+65.2 kb to TSS+65.3 kb,

[1705] (18) between TSS+65.3 kb to TSS+65.4 kb,

[1706] (19) between TSS+65.4 kb to TSS+65.5 kb,

[1707] (20) between TSS+65.5 kb to TSS+65.7 kb,

[1708] (21) between TSS+65.7 kb to TSS+65.8 kb,

[1709] (22) between TSS+65.8 kb to TSS+65.9 kb,

[1710] (23) between TSS+65.9 kb to TSS+66 kb,

[1711] (24) between TSS+66 kb to TSS+67 kb,

[1712] (25) between TSS+67 kb to TSS+68 kb,

[1713] (26) between TSS+68 kb to TSS+69 kb,

[1714] (27) between TSS+69 kb to TSS+70 kb,

[1715] (28) between TSS+70 kb to TSS+75 kb,

[1716] (29) between TSS+75 kb to TSS+80 kb, or

[1717] (30) between TSS+80 kb to TSS+84.4 kb.

[1718] While not wishing to be bound by theory, it is believed that the two sets of breaks (either the double strand break or the pair of single strand breaks) allow for NHEJ-mediated deletion of erythroid enhancer in the BCL11A gene.

[1719] In an embodiment, the method comprises introducing a NHEJ-mediated deletion of a genomic sequence including the erythroid enhancer. As described herein, in one embodiment, the method comprises the introduction of two sets of breaks (e.g., two pairs of single strand breaks)—one 5′ and the other 3′ to (i.e., flanking) the SCD target position (e.g., the erythroid enhancer). Two gRNAs, e.g., unimolecular (or chimeric) or modular gRNA molecules, are configured to position the two sets of breaks on opposite sides of the SCD target knockdown position (e.g., the erythroid enhancer) in the BCL11A gene. In an embodiment, the first set of breaks (i.e., the first pair of single strand breaks) is positioned upstream of the erythroid enhancer within intron 2 (e.g., between TSS+0.75 kb to TSS+52.0 kb), and the second set of breaks (i.e., the second pair of single strand breaks) is positioned downstream of the erythroid enhancer within intron 2 (e.g., between TSS+64.4 kb to TSS+84.7 kb) (see FIG. 15). In an embodiment, the two sets of breaks (e.g., two pairs of single strand breaks)) are positioned to remove a portion of the erythroid enhancer resulting in disruption of one or more DHSs. In an embodiment, the breaks (i.e., the two pairs of single strand breaks) are positioned to avoid unwanted target chromosome elements, such as repeat elements, e.g., an Alu repeat, or the endogenous splice sites.

[1720] The first pair of single strand breaks may be positioned as follows:
[1721] (1) upstream of the 5′ end of the erythroid enhancer in intron 2 (e.g., between TSS+0.75 kb to TSS+52.0 kb), or
[1722] (2) within the erythroid enhancer provided that a portion of the erythroid enhancer is removed resulting in disruption of one or more DHSs (e.g., between TSS+52.0 kb to TSS+64.4 kb),
   and the second pair of single strand breaks to be paired with the first pair of single strand breaks may be positioned as follows:
[1723] (1) downstream the 3′ end of the erythroid enhancer in intron 2 (e.g., between TSS+64.4 kb to TSS+84.7 kb), or
[1724] (2) within the erythroid enhancer provided that a portion of the erythroid enhancer is removed resulting in disruption of one or more DHSs (e.g., between TSS+52.0 kb to TSS+64.4 kb).

[1725] For example, the pair of single strand breaks may be positioned in the BCL11A gene:

[1726] (1) between TSS+0.75 kb to TSS+10 kb,

[1727] (2) between TSS+10 kb to TSS+20 kb,

[1728] (3) between TSS+20 kb to TSS+30 kb,

[1729] (4) between TSS+30 kb to TSS+40 kb,

[1730] (5) between TSS+40 kb to TSS+45 kb,

[1731] (6) between TSS+45 kb to TSS+47.5 kb,

[1732] (7) between TSS+47.5 kb to TSS+50 kb,

[1733] (8) between TSS+50 kb to TSS+51 kb,

[1734] (9) between TSS+51 kb to TSS+51.1 kb,

[1735] (10) between TSS+51.1 kb to TSS+51.2 kb,

[1736] (11) between TSS+51.2 kb to TSS+51.3 kb,

[1737] (12) between TSS+51.3 kb to TSS+51.4 kb,

[1738] (13) between TSS+51.4 kb to TSS+51.5 kb,

[1739] (14) between TSS+51.5 kb to TSS+51.6 kb,

[1740] (15) between TSS+51.6 kb to TSS+51.7 kb,

[1741] (16) between TSS+51.7 kb to TSS+51.8 kb,

[1742] (17) between TSS+51.8 kb to TSS+51.9 kb,

[1743] (18) between TSS+51.9 kb to TSS+52 kb,

[1744] (19) between TSS+52 kb to TSS+53 kb,

[1745] (20) between TSS+53 kb to TSS+54 kb,

[1746] (21) between TSS+54 kb to TSS+55 kb,

[1747] (22) between TSS+55 kb to TSS+56 kb,

[1748] (23) between TSS+56 kb to TSS+57 kb,

[1749] (24) between TSS+57 kb to TSS+58 kb,

[1750] (25) between TSS+58 kb to TSS+59 kb,

[1751] (26) between TSS+59 kb to TSS+60 kb,

[1752] (27) between TSS+60 kb to TSS+61 kb,

[1753] (28) between TSS+61 kb to TSS+62 kb,

[1754] (29) between TSS+62 kb to TSS+63 kb,

[1755] (30) between TSS+63 kb to TSS+64 kb, or

[1756] (31) between TSS+64 kb to TSS+64.4 kb,

and the second pair of single strand breaks to be paired with the first pair of single strand breaks may be positioned in the BCL11A gene:

[1757] (1) between TSS+52 kb to TSS+53 kb,

[1758] (2) between TSS+53 kb to TSS+54 kb,

[1759] (3) between TSS+54 kb to TSS+55 kb,

[1760] (4) between TSS+55 kb to TSS+56 kb,

[1761] (5) between TSS+56 kb to TSS+57 kb,

[1762] (6) between TSS+57 kb to TSS+58 kb,

[1763] (7) between TSS+58 kb to TSS+59 kb,

[1764] (8) between TSS+59 kb to TSS+60 kb,

[1765] (9) between TSS+60 kb to TSS+61 kb,

[1766] (10) between TSS+61 kb to TSS+62 kb,

[1767] (11) between TSS+62 kb to TSS+63 kb,

[1768] (12) between TSS+63 kb to TSS+64 kb,

[1769] (13) between TSS+64 kb to TSS+64.4 kb,

[1770] (14) between TSS+64.4 kb to TSS+65 kb,

[1771] (15) between TSS+65 kb to TSS+65.1 kb,

[1772] (16) between TSS+65.1 kb to TSS+65.2 kb,

[1773] (17) between TSS+65.2 kb to TSS+65.3 kb,

[1774] (18) between TSS+65.3 kb to TSS+65.4 kb,

[1775] (19) between TSS+65.4 kb to TSS+65.5 kb,

[1776] (20) between TSS+65.5 kb to TSS+65.7 kb,

[1777] (21) between TSS+65.7 kb to TSS+65.8 kb,

[1778] (22) between TSS+65.8 kb to TSS+65.9 kb,

[1779] (23) between TSS+65.9 kb to TSS+66 kb,

[1780] (24) between TSS+66 kb to TSS+67 kb,

[1781] (25) between TSS+67 kb to TSS+68 kb,

[1782] (26) between TSS+68 kb to TSS+69 kb,

[1783] (27) between TSS+69 kb to TSS+70 kb,

[1784] (28) between TSS+70 kb to TSS+75 kb,

[1785] (29) between TSS+75 kb to TSS+80 kb, or

[1786] (30) between TSS+80 kb to TSS+84.4 kb.

[1787] While not wishing to be bound by theory, it is believed that the two sets of breaks (e.g., the two pair of single strand breaks) allow for NHEJ-mediated deletion of erythroid enhancer in the BCL11A gene.

[1788] Knocking down the BCL11A gene mediated by enzymatically inactive Cas9 (eiCas9) or an eiCas9-fusion protein by targeting the promoter region of the gene.

[1789] A targeted knockdown approach reduces or eliminates expression of functional BCL11A gene product. As described herein, a targeted knockdown is mediated by targeting an enzymatically inactive Cas9 (eiCas9) or an eiCas9 fused to a transcription repressor domain or chromatin modifying protein to alter transcription, e.g., to block, reduce, or decrease transcription, of the BCL11A gene.

[1790] Methods and compositions discussed herein may be used to alter the expression of the BCL11A gene to treat or prevent SCD by targeting a promoter region of the BCL11A gene. In an embodiment, the promoter region, e.g., at least 2 kb, at least 1.5 kb, at least 1.0 kb, or at least 0.5 kb upstream or downstream of the TSS is targeted to knockdown expression of the BCL11A gene. In an embodiment, the methods and compositions discussed herein may be used to knock down the BCL11A gene to treat or prevent SCD by targeting 0.5 kb upstream or downstream of the TSS. A targeted knockdown approach reduces or eliminates expression of functional BCL11A gene product. As described herein, a targeted knockdown is mediated by targeting an enzymatically inactive Cas9 (eiCas9) or an eiCas9 fused to a transcription repressor domain or chromatin modifying protein to alter transcription, e.g., to block, reduce, or decrease transcription, of the BCL11A gene.

[1791] Other Embodiments Involving Circulating Blood Cells and HBB and BCL11A Genes (SCD)

[1792] In an embodiment, methods and compositions discussed herein, provide for the treatment and prevention of Sickle Cell Disease (SCD), also known as Sickle Cell Anemia (SCA). SCD is an inherited hematologic disease.

[1793] In healthy individuals, two beta-globin molecules pair with two alpha-globin molecules to form normal hemoglobin (Hb). In SCD, mutations in the beta-globin (HBB) gene, e.g., a point mutation (GAG→GTG) that results in the substitution of valine for glutamic acid at amino acid position 6 of the beta-globin molecule, cause production of sickle hemoglobin (HbS). HbS is more likely to polymerize and leads to the characteristic sickle shaped red blood cells (RBCs). Sickle shaped RBCs give rise to multiple manifestations of disease, such as, anemia, sickle cell crises, vaso-occlusive crises, aplastic crises and acute chest syndrome. Alpha-globin can also pair with fetal hemoglobin (HbF), which significantly moderates the severe anemia and other symptoms of SCD. However, the expression of HbF is negatively regulated by the BCL11A gene product.

[1794] In one aspect, methods and compositions disclosed herein provide a number of approaches for treating SCD. As is discussed in more detail herein, methods described herein provide for treating SCD by correcting a target position in the HBB gene to provide corrected, or functional, e.g., wild type, beta-globin. Methods and compositions discussed herein can be used to treat or prevent SCD by altering the BCL11A gene (also known as B-cell CLL/lymphoma 11A, BCL11A-L, BCL11A-S, BCL11A-XL, CTIP1, HBFQTL5 and ZNF). BCL11A encodes a zinc-finger protein that is involved in the regulation of globin gene expression. By altering the BCL11A gene (e.g., one or both alleles of the BCL11A gene), the levels of gamma globin can be increased. Gamma globin can replace beta globin in the hemoglobin complex and effectively carry oxygen to tissues, thereby ameliorating SCD disease phenotypes.

[1795] In one aspect, methods and compositions discussed herein, provide for the correction of the underlying genetic cause of SCD, e.g., the correction of a mutation at a target position in the HBB gene, e.g., correction of a mutation at amino acid position 6, e.g., an E6V substitution in the HBB gene.

[1796] Mutations in the HBB gene (also known as beta globin, CD113t-C and HBD) have been shown to cause SCD. Mutations leading to SCD can be described based on their target positions in the HBB gene. In an embodiment, the target position is E6, e.g., E6V, in the HBB gene.

[1797] “SCD target point position”, as used herein, refers to a target position in the HBB gene, typically a single nucleotide, which, if mutated, can result in a protein having a mutant amino acid and give rise to SCD. In an embodiment, the SCD target position is the target position at which a change can give rise to an E6 mutant protein, e.g., a protein having an E6V substitution.

[1798] While much of the disclosure herein is presented in the context of the mutation in the HBB gene that gives rise to an E6 mutant protein (e.g., E6V mutant protein), the methods and compositions herein are broadly applicable to any mutation, e.g., a point mutation or a deletion, in the HBB gene that gives rise to SCD.

[1799] While not wishing to be bound by theory, it is believed that, in an embodiment, a mutation at an SCD target point position in the HBB gene is corrected, e.g., by homology directed repair (HDR), as described herein.

[1800] In one aspect, methods and compositions discussed herein may be used to alter the BCL11A gene to treat or prevent SCD, by targeting the BCL11A gene, e.g., coding or non-coding regions of the BCL11A gene. Altering the BCL11A gene herein refers to reducing or eliminating (1) BCL11A gene expression, (2) BCL11A protein function, or (3) the level of BCL11A protein.

[1801] In an embodiment, the coding region (e.g., an early coding region) of the BCL11A gene is targeted for alteration. In an embodiment, a non-coding sequence (e.g., an enhancer region, a promoter region, an intron, 5′UTR, 3′UTR, or polyadenylation signal) is targeted for alteration.

[1802] In an embodiment, the method provides an alteration that comprises disrupting the BCL11A gene by the insertion or deletion of one or more nucleotides mediated by Cas9 (e.g., enzymatically active Cas9 (eaCas9), e.g., Cas9 nuclease or Cas9 nickase) as described below. This type of alteration is also referred to as “knocking out” the BCL11A gene.

[1803] In another embodiment, the method provides an alteration that does not comprise nucleotide insertion or deletion in the BCL11A gene and is mediated by enzymatically inactive Cas9 (eiCas9) or an eiCas9-fusion protein, as described below. This type of alteration is also referred to as “knocking down” the BCL11A gene.

[1804] In an embodiment, the methods and compositions discussed herein may be used to alter the BCL11A gene to treat or prevent SCD by knocking out one or both alleles of the BCL11A gene. In an embodiment, the coding region (e.g., an early coding region) of the BCL11A gene, is targeted to alter the gene. In an embodiment, a non-coding region of the BCL11A gene (e.g., an enhancer region, a promoter region, an intron, 5′ UTR, 3′UTR, polyadenylation signal) is targeted to alter the gene. In an embodiment, an enhancer (e.g., a tissue-specific enhancer, e.g., a myeloid enhancer, e.g., an erythroid enhancer) is targeted to alter the gene. BCL11A erythroid enhancer comprises an approximate12.4 kb fragment of BCL11A intron2, located between approximate +52.0 to +64.4 kilobases (kb) from the Transcription Start Site (TSS+52 kb to TSS+64.4 kb, see FIG. 15). It's also referred to herein as chromosome 2 location 60,716,189-60,728,612 (according to UCSC Genome Browser hg 19 human genome assembly). Three deoxyribonuclese I hypersensitive sites (DHSs), TSS+62 kb, TSS+58 kb and TSS+55 kb are located in this region. Deoxyribonuclease I sensitivity is a marker for gene regulatory elements. While not wishing to be bound by theory, it's believed that deleting the ehancer region (e.g., TSS+52 kb to TSS+64.4 kb) may reduce or eliminate BCL11A expression in erythroid precursors which leads to gamma globin derepression while sparing BCL11A expression in nonerythoroid lineages. In an embodiment, the method provides an alteration that comprises a deletion of the enhancer region (e.g., a tissue-specific enhancer, e.g., a myleloid enhancer, e.g., an erythroid enhancer) or a protion of the region resulting in disruption of one or more DNase 1-hypersensitivie sites (DHS). In an embodiment, the method provides an alteration that comprises an insertion or deletion of one or more nucleotides. As described herein, in an embodiment, a targeted knockout approach is mediated by non-homologous end joining (NHEJ) using a CRISPR/Cas system comprising an enzymatically active Cas9 (eaCas9). In an embodiment, a targeted knockout approach alters the BCL11A gene. In an embodiment, a targeted knockout approach reduces or eliminates expression of functional BCL11A gene product. In an embodiment, targeting affects one or both alleles of the BCL11A gene. In an embodiment, an enhancer disruption approach reduces or eliminates expression of functional BCL11A gene product in the erythroid lineage.

[1805] “SCD target knockout position”, as used herein, refers to a position in the BCL11A gene, which if altered, e.g., disrupted by insertion or deletion of one or more nucleotides, e.g., by NHEJ-mediated alteration, results in reduction or elimination of expression of functional BCL11A gene product. In an embodiment, the position is in the BCL11A coding region, e.g., an early coding region. In an embodiment, the position is in the BCL11A non-coding region, e.g., an enhancer region.

[1806] In an embodiment, methods and compositions discussed herein, provide for altering (e.g., knocking out) the BCL11A gene. In an embodiment, knocking out the BCL11A gene herein refers to (1) insertion or deletion (e.g., NHEJ-mediated insertion or deletion) of one or more nucleotides in close proximity to or within the early coding region of the BCL11A gene, or (2) deletion (e.g., NHEJ-mediated deletion) of a genomic sequence including the erythroid enhancer of the BCL11A gene.

[1807] In an embodiment, the SCD target knockout position is altered by genome editing using the CRISPR/Cas9 system. The SCD target knockout position may be targeted by cleaving with either a single nuclease or dual nickases, e.g., to induce insertion or deletion (e.g., NHEJ-mediated insertion or deletion) of one or more nucleotides in close proximity to or within the early coding region of the SCD target knockout position or to delete (e.g., mediated by NHEJ) a genomic sequence including the erythroid enhancer of the BCL11A gene.

[1808] In an embodiment, the methods and compositions described herein introduce one or more breaks in close proximity to or within the early coding region in at least one allele of the BCL11A gene. In an embodiment, a single strand break is introduced in close proximity to or within the early coding region in at least one allele of the BCL11A gene. In an embodiment, the single strand break will be accompanied by an additional single strand break, positioned by a second gRNA molecule.

[1809] In an embodiment, a double strand break is introduced in close proximity to or within the early coding region in at least one allele of the BCL11A gene. In an embodiment, a double strand break will be accompanied by an additional single strand break positioned by a second gRNA molecule. In an embodiment, a double strand break will be accompanied by two additional single strand breaks positioned by a second gRNA molecule and a third gRNA molecule.

[1810] In an embodiment, a pair of single strand breaks is introduced in close proximity to or within the early coding region in at least one allele of the BCL11A gene. In an embodiment, the pair of single strand breaks will be accompanied by an additional double strand break, positioned by a third gRNA molecule. In an embodiment, the pair of single strand breaks will be accompanied by an additional pair of single strand breaks positioned by a third gRNA molecule and a fourth gRNA molecule.

[1811] In an embodiment, two double strand breaks are introduced to flank the erythroid enhancer at the in the BCL11A gene (one 5′ and the other one 3′ to the erythroid enhancer) to remove (e.g., delete) the genomic sequence including the erythroid enhancer. It is contemplated herein that in an embodiment the deletion of the genomic sequence including the erythroid enhancer is mediated by NHEJ. In an embodiment, the breaks (i.e., the two double strand breaks) are positioned to avoid unwanted deletion of certain elements, such as endogenous splice sites. The breaks, i.e., two double strand breaks, can be positioned upstream and downstream of the erythroid enhancer, as discussed herein.

[1812] In an embodiment, two sets of breaks (e.g., one double strand break and a pair of single strand breaks) are introduced to flank the erythroid enhancer in the BCL11A gene (one set 5′ and the other set 3′ to the erythroid enhancer) to remove (e.g., delete) the genomic sequence including the erythroid enhancer. It is contemplated herein that in an embodiment the deletion of the genomic sequence including the erythroid enhancer is mediated by NHEJ. In an embodiment, the breaks (i.e., the double strand break and the pair of single strand breaks) are positioned to avoid unwanted deletion of certain chromosome elements, such as endogenous splice sites. The breaks, e.g., the double strand break and the pair of single strand breaks, can be positioned upstream and downstream of the erythroid enhancer, as discussed herein.

[1813] In an embodiment, two sets of breaks (e.g., two pairs of single strand breaks) are introduced to flank the erythroid enhancer at the SCD target position in the BCL11A gene (one set 5′ and the other set 3′ to the erythroid enhancer) to remove (e.g., delete) the genomic sequence including the erythroid enhancer. It is contemplated herein that in an embodiment the deletion of the genomic sequence including the erythroid enhancer is mediated by NHEJ. In an embodiment, the breaks (i.e., the two pairs of single strand breaks) are positioned to avoid unwanted deletion of certain chromosome elements, such as endogenous splice sites. The breaks, e.g., the two pairs of single strand breaks, can be positioned upstream and downstream of the erythroid enhancer, as discussed herein.

[1814] In an embodiment, the methods and compositions discussed herein may be used to alter the BCL11A gene to treat or prevent SCD by knocking down one or both alleles of the BCL11A gene. In one embodiment, the coding region of the BCL11A gene, is targeted to alter the gene. In another embodiment, a non-coding region (e.g., an enhancer region, the promoter region, an intron, 5′ UTR, 3′UTR, polyadenylation signal) of the BCL11A gene is targeted to alter the gene. In an embodiment, the promoter region of the BCL11A gene is targeted to knock down the expression of the BCL11A gene. A targeted knockdown approach alters, e.g., reduces or eliminates the expression of the BCL11A gene. As described herein, in an embodiment, a targeted knockdown is mediated by targeting an enzymatically inactive Cas9 (eiCas9) or an eiCas9 fused to a transcription repressor domain or chromatin modifying protein to alter transcription, e.g., to block, reduce, or decrease transcription, of the BCL11A gene.

[1815] “SCD target knockdown position”, as used herein, refers to a position, e.g., in the BCL11A gene, which if targeted by an eiCas9 or an eiCas9 fusion described herein, results in reduction or elimination of expression of functional BCL11A gene product. In an embodiment, transcription is reduced or eliminated. In an embodiment, the position is in the BCL11A promoter sequence, In an embodiment, a position in the promoter sequence of the BCL11A gene is targeted by an enzymatically inactive Cas9 (eiCas9) or an eiCas9-fusion protein, as described herein.

[1816] In an embodiment, one or more gRNA molecule comprising a targeting domain configured to target an enzymatically inactive Cas9 (eiCas9) or an eiCas9 fusion protein (e.g., an eiCas9 fused to a transcription repressor domain), sufficiently close to a SCD target knockdown position to reduce, decrease or repress expression of the BCL11A gene.

[1817] “SCD target position”, as used herein, refers to any of an SCD target point position, SCD target knockout position, or SCD target knockdown position, as described herein.

[1818] In one aspect, disclosed herein is a gRNA molecule, e.g., an isolated or non-naturally occurring gRNA molecule, comprising a targeting domain which is complementary with a target domain from the HBB gene or BCL11A gene.

[1819] When two or more gRNAs are used to position two or more cleavage events, e.g., double strand or single strand breaks, in a target nucleic acid, it is contemplated that the two or more cleavage events may be made by the same or different Cas9 proteins. For example, when two gRNAs are used to position two double strand breaks, a single Cas9 nuclease may be used to create both double strand breaks. When two or more gRNAs are used to position two or more single stranded breaks (single strand breaks), a single Cas9 nickase may be used to create the two or more single strand breaks. When two or more gRNAs are used to position at least one double strand break and at least one single strand break, two Cas9 proteins may be used, e.g., one Cas9 nuclease and one Cas9 nickase. It is contemplated that when two or more Cas9 proteins are used that the two or more Cas9 proteins may be delivered sequentially to control specificity of a double strand versus a single strand break at the desired position in the target nucleic acid.

[1820] In an embodiment, the targeting domain of the first gRNA molecule and the targeting domain of the second gRNA molecule hybridize to the target domain through complementary base pairing to opposite strands of the target nucleic acid molecule. In an embodiment, the gRNA molecule and the second gRNA molecule are configured such that the PAMs are oriented outward.

[1821] In an embodiment, the targeting domain of a gRNA molecule is configured to avoid unwanted target chromosome elements, such as repeat elements, e.g., an Alu repeat, or the endogenous splice sites, in the target domain. The gRNA molecule may be a first, second, third and/or fourth gRNA molecule.

[1822] In an embodiment, the targeting domain of a gRNA molecule is configured to position a cleavage event sufficiently far from a preselected nucleotide, e.g., the nucleotide of a coding region, such that the nucleotide is not altered. In an embodiment, the targeting domain of a gRNA molecule is configured to position an intronic cleavage event sufficiently far from an intron/exon border, or naturally occurring splice signal, to avoid alteration of the exonic sequence or unwanted splicing events. The gRNA molecule may be a first, second, third and/or fourth gRNA molecule, as described herein.

[1823] In an embodiment, a point mutation in the HBB gene, e.g., at E6, e.g., E6V, is targeted, e.g., for correction.

[1824] In an embodiment, the SCD target point position is E6, e.g., E6V, and two gRNAs are used to position two breaks, e.g., two single stranded breaks, in the target nucleic acid sequence.

[1825] In another embodiment, a position in the coding region, e.g., the early coding region, of the BCL11A gene is targeted, e.g., for knockout.

[1826] In an embodiment, the SCD target knockout position is the BCL11A coding region, e.g., early coding region, and more than one gRNA is used to position breaks, e.g., two single stranded breaks or two double stranded breaks, or a combination of single strand and double strand breaks, e.g., to create one or more indels, in the target nucleic acid sequence.

[1827] In another embodiment, a position in the non-coding region, e.g., the enhancer region, of the BCL11A gene is targeted, e.g., for knockout.

[1828] In an embodiment, the targeting domain of the gRNA molecule is configured to target an enzymatically inactive Cas9 (eiCas9) or an eiCas9 fusion protein (e.g., an eiCas9 fused to a transcription repressor domain), sufficiently close to an SCD knockdown target position to reduce, decrease or repress expression of the BCL11A gene. In an embodiment, the targeting domain is configured to target the promoter region of the BCL11A gene to block transcription initiation, binding of one or more transcription enhancers or activators, and/or RNA polymerase. One or more gRNA may be used to target an eiCas9 to the promoter region of the BCL11A gene.

[1829] In an embodiment, the SCD target knockdown position is the BCL11A promoter region more than one gRNA may be used to position an eiCas9 or an eiCas9-fusion protein (e.g., an eiCas9-transcription repressor domain fusion protein), in the target nucleic acid sequence.

[1830] In an embodiment, the targeting domain which is complementary with the BCL11A gene is 16 nucleotides or more in length. In an embodiment, the targeting domain is 16 nucleotides in length. In an embodiment, the targeting domain is 17 nucleotides in length. In another embodiment, the targeting domain is 18 nucleotides in length. In still another embodiment, the targeting domain is 19 nucleotides in length. In still another embodiment, the targeting domain is 20 nucleotides in length. In still another embodiment, the targeting domain is 21 nucleotides in length. In still another embodiment, the targeting domain is 22 nucleotides in length. In still another embodiment, the targeting domain is 23 nucleotides in length. In still another embodiment, the targeting domain is 24 nucleotides in length. In still another embodiment, the targeting domain is 25 nucleotides in length. In still another embodiment, the targeting domain is 26 nucleotides in length.

[1831] In an embodiment, the targeting domain comprises 16 nucleotides. In an embodiment, the targeting domain comprises 17 nucleotides. In an embodiment, the targeting domain comprises 18 nucleotides. In an embodiment, the targeting domain comprises 19 nucleotides. In an embodiment, the targeting domain comprises 20 nucleotides. In an embodiment, the targeting domain comprises 21 nucleotides. In an embodiment, the targeting domain comprises 22 nucleotides. In an embodiment, the targeting domain comprises 23 nucleotides. In an embodiment, the targeting domain comprises 24 nucleotides. In an embodiment, the targeting domain comprises 25 nucleotides. In an embodiment, the targeting domain comprises 26 nucleotides.

[1832] In an embodiment, the gRNA, e.g., a gRNA comprising a targeting domain, which is complementary with the HBB gene or BCL11A gene, is a modular gRNA. In another embodiment, the gRNA is a unimolecular or chimeric gRNA.

[1833] HBB gRNA as described herein may comprise from 5′ to 3′: a targeting domain (comprising a “core domain”, and optionally a “secondary domain”); a first complementarity domain; a linking domain; a second complementarity domain; a proximal domain; and a tail domain. In an embodiment, the proximal domain and tail domain are taken together as a single domain.

[1834] In an embodiment, a gRNA comprises a linking domain of no more than 25 nucleotides in length; a proximal and tail domain, that taken together, are at least 20 nucleotides in length; and a targeting domain equal to or greater than 16, 17, 18, 19, 20, 21, 22, 23, 24, 25 or 26 nucleotides in length.

[1835] In another embodiment, a gRNA comprises a linking domain of no more than 25 nucleotides in length; a proximal and tail domain, that taken together, are at least 30 nucleotides in length; and a targeting domain equal to or greater than 16, 17, 18, 19, 20, 21, 22, 23, 24, 25 or 26 nucleotides in length.

[1836] In another embodiment, a gRNA comprises a linking domain of no more than 25 nucleotides in length; a proximal and tail domain, that taken together, are at least 30 nucleotides in length; and a targeting domain equal to or greater than 16, 17, 18, 19, 20, 21, 22, 23, 24, 25 or 26 nucleotides in length.

[1837] In another embodiment, a gRNA comprises a linking domain of no more than 25 nucleotides in length; a proximal and tail domain, that taken together, are at least 40 nucleotides in length; and a targeting domain equal to or greater than 16, 17, 18, 19, 20, 21, 22, 23, 24, 25 or 26 nucleotides in length.

[1838] A cleavage event, e.g., a double strand or single strand break, is generated by a Cas9 molecule. The Cas9 molecule may be an enzymatically active Cas9 (eaCas9) molecule, e.g., an eaCas9 molecule that forms a double strand break in a target nucleic acid or an eaCas9 molecule forms a single strand break in a target nucleic acid (e.g., a nickase molecule). Alternatively, in an embodiment, the Cas9 molecule may be an enzymatically inactive Cas9 (eiCas9) molecule or a modified eiCas9 molecule, e.g., the eiCas9 molecule is fused to Kruppel-associated box (KRAB) to generate an eiCas9-KRAB fusion protein molecule.

[1839] In an embodiment, the eaCas9 molecule catalyzes a double strand break.

[1840] In an embodiment, the eaCas9 molecule comprises HNH-like domain cleavage activity but has no, or no significant, N-terminal RuvC-like domain cleavage activity. In this case, the eaCas9 molecule is an HNH-like domain nickase, e.g., the eaCas9 molecule comprises a mutation at D10, e.g., D10A. In another embodiment, the eaCas9 molecule comprises N-terminal RuvC-like domain cleavage activity but has no, or no significant, HNH-like domain cleavage activity. In an embodiment, the eaCas9 molecule is an N-terminal RuvC-like domain nickase, e.g., the eaCas9 molecule comprises a mutation at H840, e.g., H840A. In an embodiment, the eaCas9 molecule is an N-terminal RuvC-like domain nickase, e.g., the eaCas9 molecule comprises a mutation at N863, e.g., N863A.

[1841] In an embodiment, a single strand break is formed in the strand of the target nucleic acid to which the targeting domain of said gRNA is complementary. In another embodiment, a single strand break is formed in the strand of the target nucleic acid other than the strand to which the targeting domain of said gRNA is complementary.

[1842] In an embodiment, a mutation in the HBB gene is corrected, e.g., by HDR, using an exogenously provided template nucleic acid.

[1843] In an embodiment, the template nucleic acid is a single stranded nucleic acid. In another embodiment, the template nucleic acid is a double stranded nucleic acid. In an embodiment, the template nucleic acid comprises a nucleotide sequence, e.g., of one or more nucleotides, that will be added to or will template a change in the target nucleic acid. In another embodiment, the template nucleic acid comprises a nucleotide sequence that may be used to modify the target position. In another embodiment, the template nucleic acid comprises a nucleotide sequence, e.g., of one or more nucleotides, that corresponds to wild type sequence of the target nucleic acid, e.g., of the target position.

[1844] The template nucleic acid may comprise a replacement sequence, e.g., a replacement sequence from the Table 650. In an embodiment, the template nucleic acid comprises a 5′ homology arm, e.g., a 5′ homology arm from Table 650. In another embodiment, the template nucleic acid comprises a 3′ homology arm, e.g., a 3′ homology arm from Table 650.

[1845] In another embodiment, a mutation in the HBB gene is corrected, e.g., by HDR, without using an exogenously provided template nucleic acid. While not wishing to be bound by theory, it is believed that an endogenous region of homology can mediate HDR-based correction. In an embodiment, alteration of the target sequence occurs by HDR with an endogenous genomic donor sequence. In an embodiment, the endogenous genomic donor sequence is located on the same chromosome as the target sequence. In another embodiment, the endogenous genomic donor sequence is located on a different chromosome from the target sequence. In an embodiment, the endogenous genomic donor sequence comprises one or more nucleotides derived from the HBB gene. Mutations in the HBB gene that can be corrected (e.g., altered) by HDR with an endogenous genomic donor sequence include, e.g., a point mutation at E6, e.g., E6V.

[1846] In another aspect, disclosed herein is a composition comprising (a) a gRNA molecule comprising a targeting domain that is complementary with a target domain in the HBB gene or BCL11A gene, as described herein. The composition of (a) may further comprise (b) a Cas9 molecule, e.g., a Cas9 molecule as described herein. The Cas9 molecule may be an enzymatically active Cas9 (eaCas9) molecule, e.g., an eaCas9 molecule that forms a double strand break in a target nucleic acid or an eaCas9 molecule forms a single strand break in a target nucleic acid (e.g., a nickase molecule). Alternatively, in some embodiments, the Cas9 molecule may be an enzymatically inactive Cas9 (eiCas9) molecule or a modified eiCas9 molecule, e.g., the eiCas9 molecule is fused to Kruppel-associated box (KRAB) to generate an eiCas9-KRAB fusion protein molecule.

[1847] A composition of (a) and (b) may further comprise (c) a second, third and/or fourth gRNA molecule, e.g., a second, third and/or fourth gRNA molecule described herein. A composition of (a), (b) and (c) may further comprise (d) a template nucleic acid (in an embodiment where an exogenous template is used).

[1848] In another aspect, disclosed herein is a method of altering a cell, e.g., altering the structure, e.g., altering the sequence, of a target nucleic acid of a cell, comprising contacting said cell with: (a) a gRNA that targets the HBB gene or BCL11A gene, e.g., a gRNA as described herein; (b) a Cas9 molecule, e.g., a Cas9 molecule as described herein; and optionally, (c) a second, third and/or fourth gRNA that targets HBB gene or BCL11A gene, e.g., a gRNA; and optionally, (d) a template nucleic acid, as described herein.

[1849] In an embodiment, the method comprises contacting said cell with (a) and (b).

[1850] In an embodiment, the method comprises contacting said cell with (a), (b), and (c).

[1851] In an embodiment, the method comprises contacting said cell with (a), (b), (c) and (d).

[1852] In an embodiment, the gRNA targets the HBB gene and no exogenous template nucleic acid is contacted with the cell.

[1853] In an embodiment, the method comprises contacting a cell from a subject suffering from or likely to develop SCD. The cell may be from a subject having a mutation at an SCD target position in the HBB gene or a subject which would benefit from having a mutation at an SCD target position in the BCL11A gene.

[1854] In an embodiment, the cell being contacted in the disclosed method is an erythroid cell. The contacting may be performed ex vivo and the contacted cell may be returned to the subject's body after the contacting step.

[1855] In an embodiment, the method of altering a cell as described herein comprises acquiring knowledge of the sequence at an SCD target position in said cell, prior to the contacting step. Acquiring knowledge of the sequence at an SCD target position in the cell may be by sequencing the HBB gene or BCL11A gene, or a portion of the HBB gene or BCL11A gene.

[1856] In an embodiment, contacting comprises delivering to the cell a Cas9 molecule of (b), as a protein or an mRNA, said gRNA of (a), as an RNA, and optionally said second gRNA of (c), as an RNA.

[1857] In an embodiment, contacting comprises delivering to the cell a gRNA of (a) as an RNA, optionally said second gRNA of (c) as an RNA, and a nucleic acid that encodes the Cas9 molecule of (b).

[1858] In another aspect, disclosed herein is a method of treating or preventing a subject suffering from or likely to develop SCD, e.g., altering the structure, e.g., sequence, of a target nucleic acid of the subject, comprising contacting a cell from the subject with:

[1859] (a) a gRNA that targets the HBB gene or BCL11A gene, e.g., a gRNA disclosed herein;

[1860] (b) a Cas9 molecule, e.g., a Cas9 molecule disclosed herein; and

[1861] optionally, (c)(i) a second gRNA that targets the HBB gene or BCL11A gene, e.g., a second gRNA disclosed herein, and

[1862] further optionally, (c)(ii) a third gRNA, and still further optionally, (c)(iii) a fourth gRNA that target the HBB gene or BCL11A gene, e.g., a third and fourth gRNA disclosed herein.

[1863] The method of treating a subject may further comprise contacting a cell from the subject with (d) a template nucleic acid (in an embodiment where an exogenous template is used). In an embodiment, a template nucleic acid is used when the method of treating a subject uses HDR to alter the sequence of the target nucleic acid of the subject. In an embodiment, the gRNA targets the HBB gene and no exogenous template nucleic acid is contacted with a cell from the subject.

[1864] In an embodiment, contacting comprises contacting with (a) and (b).

[1865] In an embodiment, contacting comprises contacting with (a), (b), and (c)(i).

[1866] In an embodiment, contacting comprises contacting with (a), (b), (c)(i) and (c)(ii).

[1867] In an embodiment, contacting comprises contacting with (a), (b), (c)(i), (c)(ii) and (c)(iii).

[1868] In an embodiment, contacting comprises contacting with (a), (b), (c)(i) and (d).

[1869] In an embodiment, contacting comprises contacting with (a), (b), (c)(i), (c)(ii) and (d).

[1870] In an embodiment, contacting comprises contacting with (a), (b), (c)(i), (c)(ii), (c)(iii) and (d).

[1871] In an embodiment, the method comprises acquiring knowledge of the sequence (e.g., a mutation) of an SCD target position in said subject.

[1872] In an embodiment, the method comprises acquiring knowledge of the sequence (e.g., a mutation) of an SCD target position in said subject by sequencing the HBB gene or BCL11A gene or a portion of the HBB gene or BCL11A gene.

[1873] In an embodiment, the method comprises correcting a mutation at an SCD target position in the HBB gene.

[1874] In an embodiment, the method comprises correcting a mutation at an SCD target position in the HBB gene by HDR.

[1875] In an embodiment, the method comprises introducing a mutation at an SCD target position in the BCL11A gene.

[1876] In an embodiment, the method comprises introducing a mutation at an SCD target position in the BCL11A gene by NHEJ.

[1877] When the method comprises correcting the mutation at an SCD target position by HDR, a Cas9 of (b), at least one guide RNA, e.g., a guide RNA of (a) and a template nucleic acid (d) are included in the contacting step.

[1878] In an embodiment, a cell of the subject is contacted ex vivo with (a), (b), (d) and optionally (c). In an embodiment, said cell is returned to the subject's body.

[1879] In an embodiment, contacting comprises delivering to said subject said Cas9 molecule of (b), as a protein or mRNA, and a nucleic acid which encodes (a), a nucleic acid of (d) and optionally (c).

[1880] In an embodiment, contacting comprises delivering to the subject the Cas9 molecule of (b), as a protein or mRNA, the gRNA of (a), as an RNA, a nucleic acid of (d) and optionally the second gRNA of (c), as an RNA.

[1881] In an embodiment, contacting comprises delivering to the subject the gRNA of (a), as an RNA, optionally said second gRNA of (c), as an RNA, a nucleic acid that encodes the Cas9 molecule of (b), and a nucleic acid of (d).

[1882] When the method comprises (1) introducing a mutation at an SCD target position by NHEJ or (2) knocking down expression of the BCL11A gene by targeting the promoter region, a Cas9 of (b) and at least one guide RNA, e.g., a guide RNA of (a) are included in the contacting step.

[1883] In an embodiment, a cell of the subject is contacted ex vivo with (a), (b) and optionally (c). In an embodiment, said cell is returned to the subject's body.

[1884] In an embodiment, a populations of cells from a subject is contacted ex vivo with (a), (b) and optionally (c) to correct the E6V mutation in the HBB gene and a second population of cells from the subject is contacted ex vivo with (a), (b) and optionally (c) to introduce a mutation in the BCL11A gene to knockout the BCL11A gene. A mixture of the two cell populations may be returned to the subject's body to treat or prevent SCD.

[1885] In an embodiment, contacting comprises delivering to said subject said Cas9 molecule of (b), as a protein or mRNA, and a nucleic acid which encodes (a) and optionally (c).

[1886] In an embodiment, contacting comprises delivering to the subject the Cas9 molecule of (b), as a protein or mRNA, the gRNA of (a), as an RNA, and optionally the second gRNA of (c), as an RNA.

[1887] In an embodiment, contacting comprises delivering to the subject the gRNA of (a), as an RNA, optionally said second gRNA of (c), as an RNA, and a nucleic acid that encodes the Cas9 molecule of (b).

[1888] In another aspect, disclosed herein is a reaction mixture comprising a gRNA, a nucleic acid, or a composition described herein, and a cell, e.g., a cell from a subject having, or likely to develop SCD, or a subject having a mutation at an SCD target position in the HBB gene, or a cell from a subject which would benefit from having a mutation at an SCD target position in the BCL11A gene.

[1889] In another aspect, disclosed herein is a kit comprising, (a) gRNA molecule described herein, and one or more of the following:

[1890] (b) a Cas9 molecule, e.g., a Cas9 molecule described herein, or a nucleic acid or mRNA that encodes the Cas9;

[1891] (c)(i) a second gRNA molecule, e.g., a second gRNA molecule described herein;

[1892] (c)(ii) a third gRNA molecule, e.g., a second gRNA molecule described herein;

[1893] (c)(iii) a fourth gRNA molecule, e.g., a second gRNA molecule described herein;

[1894] (d) a template nucleic acid (in an embodiment where an exogenous template is used).

[1895] The compositions, reaction mixtures and kits, as disclosed herein, can also include a governing gRNA molecule, e.g., a governing gRNA molecule disclosed herein.

[1896] VI.4 Circulating Blood cells (e.g., Targeting BCL11A Gene for Treating BT)

[1897] In another aspect, the target cell is a circulating blood cell, e.g., a reticulocyte, a myeloid progenitor cell, or a hematopoietic stem cell. In an embodiment, the target cell is a bone marrow cell (e.g., a myeloid progenitor cell, an erythroid progenitor cell, a hematopoietic stem cell, or a mesenchymal stem cell). In an embodiment, the target cell is a myeloid progenitor cell (e.g., a common myeloid progenitor (CMP) cell). In an embodiment, the target cell is an erythroid progenitor cell (e.g., a megakaryocyte erythroid progenitor (MEP) cell). In an embodiment, the target cell is a hematopoietic stem cell (e.g., a long term hematopoietic stem cell (LT-HSC), a short term hematopoietic stem cell (ST-HSC), a multipotent progenitor (MPP) cell, a lineage restricted progenitor (LRP) cell).

[1898] In an embodiment, the target cell is manipulated ex vivo by editing (e.g., inducing a mutation in) the BCL11A target gene and/or modulating the expression of the BCL11A target gene, and administered to the subject. Sources of target cells for ex vivo manipulation may include, by way of example, the subject's blood, the subject's cord blood, or the subject's bone marrow. Sources of target cells for ex vivo manipulation may also include, by way of example, heterologous donor blood, cord blood, or bone marrow.

[1899] In an embodiment, a myeloid progenitor cell is removed from the subject, manipulated ex vivo as described above, and the myeloid progenitor cell is returned to the subject. In an embodiment, an erythroid progenitor cell is removed from the subject, manipulated ex vivo as described above, and the erythroid progenitor cell is returned to the subject. In an embodiment, a hematopoietic stem cell is removed from the subject, manipulated ex vivo as described above, and the hematopoietic stem cell is returned to the subject. In an embodiment, a CD34+ hematopoietic stem cell is removed from the subject, manipulated ex vivo as described above, and the CD34+ hematopoietic stem cell is returned to the subject.

[1900] A suitable cell can also include a stem cell such as, by way of example, an embryonic stem cell, an induced pluripotent stem cell, a hematopoietic stem cell, a neuronal stem cell and a mesenchymal stem cell. In an embodiment, the cell is an induced pluripotent stem (iPS) cell or a cell derived from an iPS cell, e.g., an iPS cell generated from the subject, modified to induce a mutation and differentiated into a clinically relevant cell such as a myeloid progenitor cell, an erythroid progenitor cell or a hematopoietic stem cell. In an embodiment, AAV is used to transduce the target cells, e.g., the target cells described herein.

[1901] Cells produced by the methods described herein may be used immediately. Alternatively, the cells may be frozen (e.g., in liquid nitrogen) and stored for later use. The cells will usually be frozen in 10% dimehtylsulfoxide (DMSO), 50% serum, 40% buffered medium, or some other such solution as is commonly used in the art to preserve cells at such freezing temperature and thawed in such a manner as commonly known in the art for thawing frozen cultured cells.

[1902] Methods to Treat or Prevent Beta-Thalassemia (BT)

[1903] Disclosed herein are approaches to treat or prevent BT, including beta-thalassemia major (BTM) and BT intermedia, using the compositions and methods described herein.

[1904] In one approach, the BCL11A gene is targeted as a targeted knockout or knockdown, e.g., to increase expression of fetal hemoglobin.

[1905] While not wishing to be bound by theory, it is considered that increasing levels of fetal hemoglobin (HbF) in subjects with BT may ameliorate disease. Fetal hemoglobin can replace beta hemoglobin in the hemoglobin complex, form adequate tetramers with alpha hemoglobin, and effectively carry oxygen to tissues. Subjects with beta-thalassemia who express higher levels of fetal hemoglobin have been found to have a less severe phenotype. Hydroxyurea, often used in the treatment of beta-thalassemia, may exert its mechanism of action via increasing levels of HbF production.

[1906] In an embodiment, knockout or knockdown of the BCL11A gene increases fetal hemoglobin levels in beta-thalassemia subjects and improves phenotype and/or reduces or prevents disease progression. BCL11A is a zinc-finger repressor that is involved in the regulation of fetal hemoglobin and acts to repress the synthesis of fetal hemoglobin. Knockout of the BCL11A gene in erythroid cells induces increased fetal hemoglobin (HbF) synthesis and increased HbF can result in more effective oxygen carrying capacity in subjects with beta-thalassemia (HbF will form tetramers with hemoglobin alpha).

[1907] In an embodiment, the BCL11A knockout or knockdown is targeted specifically to cells of the erythroid lineage. BCL11A knockout in erythroid cells has been found in in vitro studies to have no effect on erythroid growth, maturation and function. In an embodiment, erythroid cells are preferentially targeted, e.g., at least 90%, 95%, 96%, 97%, 98%, 99%, or 100% of the targeted cells are erythroid cells. For example, if cells are treated ex vivo and returned to the subject, erythroid cells are preferentially modified.

[1908] In an embodiment, the methods described herein result in increased fetal hemoglobin synthesis in beta thalassemia subjects, thereby improving disease phenotype in subjects with BT. For example, subjects with beta thalassemia major will suffer from less severe anemia and will need fewer blood transfusions. They will therefore have fewer complications arising from transfusions and chelation therapy. In an embodiment, the method described herein increases fetal hemoglobin synthesis and improves the oxygen carrying capacity of erythroid cells. For example, subjects are expected to demonstrate decreased rates of extramedullary erythropoiesis and decreased erythroid hypertrophy within the bone marrow. In an embodiment, the method described herein results in reduction of bone fractures, bone abnormalities, splenomegaly, and thrombosis.

[1909] Knockdown or knockout of one or both BCL11A alleles may be performed prior to disease onset or after disease onset, but preferably early in the disease course.

[1910] In an embodiment, the method comprises initiating treatment of a subject prior to disease onset.

[1911] In an embodiment, the method comprises initiating treatment of a subject after disease onset.

[1912] In an embodiment, the method comprises initiating treatment of a subject well after disease onset, e.g., 1, 2, 3, 4, 5, 6, 7, 8, 9, 10, 12, 24, or 36 months after onset of BT, e.g., BTM. While not wishing to be bound by theory it is believed that this treatment may be effective if subjects present well into the course of illness.

[1913] In an embodiment, the method comprises initiating treatment of a subject in an advanced stage of disease.

[1914] Overall, initiation of treatment for subjects at all stages of disease is expected to prevent negative consequences of disease and be of benefit to subjects.

[1915] In an embodiment, the method comprises initiating treatment of a subject prior to disease expression. In an embodiment, the method comprises initiating treatment of a subject in an early stage of disease, e.g., when a subject has tested positive for beta-thalassemia mutations but has no signs or symptoms associated with beta-thalassemia major, minor or intermedia.

[1916] In an embodiment, the method comprises initiating treatment of a subject at the appearance of microcytic anemia, e.g., in an infant, child, adult or young adult.

[1917] In an embodiment, the method comprises initiating treatment of a subject who is transfusion-dependent.

[1918] In an embodiment, the method comprises initiating treatment of a subject who has tested positive for a mutation in a beta globin gene.

[1919] In an embodiment, the method comprises initiating treatment at the appearance of any one or more of the following findings consistent with beta-thalassemia major or beta-thalassemia minor: anemia, diarrhea, fever, failure to thrive, frontal bossing, broken long bones, hepatomegaly, splenomegaly, thrombosis, pulmonary embolus, stroke, leg ulcer, cardiomyopathy, cardiac arrhythmia, and evidence of extramedullary erythropoiesis.

[1920] In an embodiment, a cell is treated, e.g., ex vivo. In an embodiment, an ex vivo treated cell is returned to a subject.

[1921] In an embodiment, allogenic or autologous bone marrow or erythroid cells are treated ex vivo. In an embodiment, an ex vivo treated allogenic or autologous bone marrow or erythroid cells are administered to the subject. In an embodiment, an erythroid cell, e.g., an autologous erythroid cell, is treated ex vivo and returned to the subject. In an embodiment, an autologous stem cell, is treated ex vivo and returned to the subject. In an embodiment, the modified HSCs are administered to the patient following no myeloablative pre-conditioning. In an embodiment, the modified HSCs are administered to the patient following mild myeloablative pre-conditioning such that following engraftment, some of the hematopoietic cells are devied from the modified HSCs. In other aspects, the HSCs are administered after full myeloablation such that following engraftment, 100% of the hematopoietic cells are derived from the modified HSCs.

[1922] Methods of Altering BCL11A

[1923] One approach to increase the expression of HbF involves identification of genes whose products play a role in the regulation of globin gene expression. One such gene is BCL11A. It plays a role in the regulation of γ globin expression. It was first identified because of its role in lymphocyte development. BCL11A encodes a zinc finger protein that is thought to be involved in the stage specific regulation of γ globin expression. BCL11A is expressed in adult erythroid precursor cells and down-regulation of its expression leads to an increase in γ globin expression. In addition, it appears that the splicing of the BCL11A mRNA is developmentally regulated. In embryonic cells, it appears that the shorter BCL11A mRNA variants, known as BCL11A-S and BCL11A-XS are primary expressed, while in adult cells, the longer BCL11A-L and BCL11A-XL mRNA variants are predominantly expressed. See, Sankaran et al (2008) Science 322 p. 1839. The BCL11A protein appears to interact with the β globin locus to alter its conformation and thus its expression at different developmental stages. Thus, if BCL11A expression is altered e.g., disrupted (e.g., reduced or eliminated), it results in the elevation of γ globin and HbF production.

[1924] Disclosed herein are methods for altering the BT target position in the BCL11A gene. Altering the BT target position is achieved, e.g., by:

[1925] (1) knocking out the BCL11A gene:
[1926] (a) insertion or deletion (e.g., NHEJ-mediated insertion or deletion) of one or more nucleotides in close proximity to or within the early coding region of the BCL11A gene, or
[1927] (b) deletion (e.g., NHEJ-mediated deletion) of genomic sequence including the erythroid enhancer of the BCL11A gene, or

[1928] (2) knocking down the BCL11A gene mediated by enzymatically inactive Cas9 (eiCas9) or an eiCas9-fusion protein by targeting the promoter region of the gene.

[1929] All approaches give rise to alteration of the BCL11A gene.

[1930] In one embodiment, methods described herein introduce one or more breaks near the early coding region in at least one allele of the BCL11A gene. In another embodiment, methods described herein introduce two or more breaks to flank the erythroid enhancer of BT target knockout position. The two or more breaks remove (e.g., delete) genomic sequence including the erythorid enhancer. In another embodiment, methods described herein comprises knocking down the BCL11A gene mediated by enzymatically inactive Cas9 (eiCas9) or an eiCas9-fusion protein by targeting the promoter region of BT target knockdown position. All methods described herein result in alteration of the BCL11A gene.

[1931] NHEJ-Mediated Introduction of an Indel in Close Proximity to or within the Early Coding Region of the BT Knockout Position

[1932] In an embodiment, the method comprises introducing a NHEJ-mediated insertion or deletion of one more nucleotides in close proximity to the BT target knockout position (e.g., the early coding region) of the BCL11A gene. As described herein, in one embodiment, the method comprises the introduction of one or more breaks (e.g., single strand breaks or double strand breaks) sufficiently close to (e.g., either 5′ or 3′ to) the early coding region of the BT target knockout position, such that the break-induced indel could be reasonably expected to span the BT target knockout position (e.g., the early coding region). While not wishing to be bound by theory, it is believed that NHEJ-mediated repair of the break(s) allows for the NHEJ-mediated introduction of an indel in close proximity to within the early coding region of the BT target knockout position.

[1933] In an embodiment, the targeting domain of the gRNA molecule is configured to provide a cleavage event, e.g., a double strand break or a single strand break, sufficiently close to the early coding region in the BCL11A gene to allow alteration, e.g., alteration associated with NHEJ in the BCL11A gene. In an embodiment, the targeting domain is configured such that a cleavage event, e.g., a double strand or single strand break, is positioned within 1, 2, 3, 4, 5, 10, 15, 20, 25, 30, 35, 40, 45, 50, 60, 70, 80, 90, 100, 150, 200, 250, 300, 350, 400, 450 or 500 nucleotides of a BT target knockout position. The break, e.g., a double strand or single strand break, can be positioned upstream or downstream of a BT target knockout position in the BCL11A gene.

[1934] In an embodiment, a second gRNA molecule comprising a second targeting domain is configured to provide a cleavage event, e.g., a double strand break or a single strand break, sufficiently close to the early coding region in the BCL11A gene, to allow alteration, e.g., alteration associated with NHEJ in the BCL11A gene, either alone or in combination with the break positioned by said first gRNA molecule. In an embodiment, the targeting domains of the first and second gRNA molecules are configured such that a cleavage event, e.g., a double strand or single strand break, is positioned, independently for each of the gRNA molecules, within 1, 2, 3, 4, 5, 10, 15, 20, 25, 30, 35, 40, 45, 50, 60, 70, 80, 90, 100, 150, 200, 250, 300, 350, 400, 450 or 500 nucleotides of the target position. In an embodiment, the breaks, e.g., double strand or single strand breaks, are positioned on both sides of a nucleotide of a BT target knockout position in the BCL11A gene. In an embodiment, the breaks, e.g., double strand or single strand breaks, are positioned on one side, e.g., upstream or downstream, of a nucleotide of a BT target knockout position in the BCL11A gene.

[1935] In an embodiment, a single strand break is accompanied by an additional single strand break, positioned by a second gRNA molecule, as discussed below. For example, the targeting domains are configured such that a cleavage event, e.g., the two single strand breaks, are positioned within 1, 2, 3, 4, 5, 10, 15, 20, 25, 30, 35, 40, 45, 50, 60, 70, 80, 90, 100, 150, 200, 250, 300, 350, 400, 450 or 500 nucleotides of the early coding region in the BCL11A gene. In an embodiment, the first and second gRNA molecules are configured such, that when guiding a Cas9 nickase, a single strand break will be accompanied by an additional single strand break, positioned by a second gRNA, sufficiently close to one another to result in alteration of the early coding region in the BCL11A gene in the BCL11A gene. In an embodiment, the first and second gRNA molecules are configured such that a single strand break positioned by said second gRNA is within 10, 20, 30, 40, or 50 nucleotides of the break positioned by said first gRNA molecule, e.g., when the Cas9 is a nickase. In an embodiment, the two gRNA molecules are configured to position cuts at the same position, or within a few nucleotides of one another, on different strands, e.g., essentially mimicking a double strand break.

[1936] In an embodiment, a double strand break can be accompanied by an additional double strand break, positioned by a second gRNA molecule, as is discussed below. For example, the targeting domain of a first gRNA molecule is configured such that a double strand break is positioned upstream of the early coding region in the BCL11A gene, e.g., within 1, 2, 3, 4, 5, 10, 15, 20, 25, 30, 35, 40, 45, 50, 60, 70, 80, 90, 100, 150, 200, 250, 300, 350, 400, 450 or 500 nucleotides of the target position; and the targeting domain of a second gRNA molecule is configured such that a double strand break is positioned downstream of the early coding region in the BCL11A gene in the BCL11A gene, e.g., within 1, 2, 3, 4, 5, 10, 15, 20, 25, 30, 35, 40, 45, 50, 60, 70, 80, 90, 100, 150, 200, 250, 300, 350, 400, 450 or 500 nucleotides of the target position.

[1937] In an embodiment, a double strand break can be accompanied by two additional single strand breaks, positioned by a second gRNA molecule and a third gRNA molecule. For example, the targeting domain of a first gRNA molecule is configured such that a double strand break is positioned upstream of the early coding region in the BCL11A gene, e.g., within 1, 2, 3, 4, 5, 10, 15, 20, 25, 30, 35, 40, 45, 50, 60, 70, 80, 90, 100, 150, 200, 250, 300, 350, 400, 450 or 500 nucleotides of the target position; and the targeting domains of a second and third gRNA molecule are configured such that two single strand breaks are positioned downstream of the early coding region in the BCL11A gene, e.g., within 1, 2, 3, 4, 5, 10, 15, 20, 25, 30, 35, 40, 45, 50, 60, 70, 80, 90, 100, 150, 200, 250, 300, 350, 400, 450 or 500 nucleotides of the target position. In an embodiment, the targeting domain of the first, second and third gRNA molecules are configured such that a cleavage event, e.g., a double strand or single strand break, is positioned, independently for each of the gRNA molecules.

[1938] In an embodiment, a first and second single strand breaks can be accompanied by two additional single strand breaks positioned by a third gRNA molecule and a fourth gRNA molecule. For example, the targeting domain of a first and second gRNA molecule are configured such that two single strand breaks are positioned upstream of the early coding region in the BCL11A gene, e.g., within 1, 2, 3, 4, 5, 10, 15, 20, 25, 30, 35, 40, 45, 50, 60, 70, 80, 90, 100, 150, 200, 250, 300, 350, 400, 450 or 500 nucleotides of the early coding region in the BCL11A gene; and the targeting domains of a third and fourth gRNA molecule are configured such that two single strand breaks are positioned downstream of a BT target knockout position in the BCL11A gene the early coding region in the BCL11A gene, e.g., within 1, 2, 3, 4, 5, 10, 15, 20, 25, 30, 35, 40, 45, 50, 60, 70, 80, 90, 100, 150, 200, 250, 300, 350, 400, 450 or 500 nucleotides of the early coding region in the BCL11A gene.

[1939] NHEJ-Mediated Deletion of the Erythroid Enhancer at the BT Target Position

[1940] In an embodiment, the method comprises introducing a NHEJ-mediated deletion of a genomic sequence including the erythroid enhancer. As described herein, in one embodiment, the method comprises the introduction of two double strand breaks—one 5′ and the other 3′ to (i.e., flanking) the BT target position (e.g., the erythroid enhancer). Two gRNAs, e.g., unimolecular (or chimeric) or modular gRNA molecules, are configured to position the two double strand breaks on opposite sides of the BT target knockdown position (e.g., the erythroid enhancer) in the BCL11A gene. In an embodiment, the first double strand break is positioned upstream of the the erythroid enhancer within intron 2 (e.g., between TSS+0.75 kb to TSS+52.0 kb), and the second double strand break is positioned downstream of the the erythroid enhancer within intron 2 (e.g., between TSS+64.4 kb to TSS+84.7 kb) (see FIG. 15). In an embodiment, the two double strand breaks are positioned to remove a portion of the erythroid enhancer resulting in disruption of one or more DHSs. In an embodiment, the breaks (i.e., the two double strand breaks) are positioned to avoid unwanted target chromosome elements, such as repeat elements, e.g., an Alu repeat, or the endogenous splice sites.

[1941] The first double strand break may be positioned as follows:
[1942] (1) upstream of the 5′ end of the erythroid enhancer in intron 2 (e.g., between TSS+0.75 kb to TSS+52.0 kb), or
[1943] (2) within the erythroid enhancer provided that a portion of the erythroid enhancer is removed resulting in disruption of one or more DHSs (e.g., between TSS+52.0 kb to TSS+64.4 kb),
   and the second double strand break to be paired with the first double strand break may be positioned as follows:
[1944] (3) downstream the 3′ end of the erythroid enhancer in intron 2 (e.g., between TSS+64.4 kb to TSS+84.7 kb), or
[1945] (4) within the erythroid enhancer provided that a portion of the erythroid enhancer is removed resulting in disruption of one or more DHSs (e.g., between TSS+52.0 kb to TSS+64.4 kb).

[1946] For example, the first double strand break may be positioned in the BCL11A gene:

[1947] (1) between TSS+0.75 kb to TSS+10 kb,

[1948] (2) between TSS+10 kb to TSS+20 kb,

[1949] (3) between TSS+20 kb to TSS+30 kb,

[1950] (4) between TSS+30 kb to TSS+40 kb,

[1951] (5) between TSS+40 kb to TSS+45 kb,

[1952] (6) between TSS+45 kb to TSS+47.5 kb,

[1953] (7) between TSS+47.5 kb to TSS+50 kb,

[1954] (8) between TSS+50 kb to TSS+51 kb,

[1955] (9) between TSS+51 kb to TSS+51.1 kb,

[1956] (10) between TSS+51.1 kb to TSS+51.2 kb,

[1957] (11) between TSS+51.2 kb to TSS+51.3 kb,

[1958] (12) between TSS+51.3 kb to TSS+51.4 kb,

[1959] (13) between TSS+51.4 kb to TSS+51.5 kb,

[1960] (14) between TSS+51.5 kb to TSS+51.6 kb,

[1961] (15) between TSS+51.6 kb to TSS+51.7 kb,

[1962] (16) between TSS+51.7 kb to TSS+51.8 kb,

[1963] (17) between TSS+51.8 kb to TSS+51.9 kb,

[1964] (18) between TSS+51.9 kb to TSS+52 kb,

[1965] (19) between TSS+52 kb to TSS+53 kb,

[1966] (20) between TSS+53 kb to TSS+54 kb,

[1967] (21) between TSS+54 kb to TSS+55 kb,

[1968] (22) between TSS+55 kb to TSS+56 kb,

[1969] (23) between TSS+56 kb to TSS+57 kb,

[1970] (24) between TSS+57 kb to TSS+58 kb,

[1971] (25) between TSS+58 kb to TSS+59 kb,

[1972] (26) between TSS+59 kb to TSS+60 kb,

[1973] (27) between TSS+60 kb to TSS+61 kb,

[1974] (28) between TSS+61 kb to TSS+62 kb,

[1975] (29) between TSS+62 kb to TSS+63 kb,

[1976] (30) between TSS+63 kb to TSS+64 kb, or

[1977] (31) between TSS+64 kb to TSS+64.4 kb,

and the second double strand break to be paired with the first double strand break may be positioned in the BCL11A gene:

[1978] (1) between TSS+52 kb to TSS+53 kb,

[1979] (2) between TSS+53 kb to TSS+54 kb,

[1980] (3) between TSS+54 kb to TSS+55 kb,

[1981] (4) between TSS+55 kb to TSS+56 kb,

[1982] (5) between TSS+56 kb to TSS+57 kb,

[1983] (6) between TSS+57 kb to TSS+58 kb,

[1984] (7) between TSS+58 kb to TSS+59 kb,

[1985] (8) between TSS+59 kb to TSS+60 kb,

[1986] (9) between TSS+60 kb to TSS+61 kb,

[1987] (10) between TSS+61 kb to TSS+62 kb,

[1988] (11) between TSS+62 kb to TSS+63 kb,

[1989] (12) between TSS+63 kb to TSS+64 kb,

[1990] (13) between TSS+64 kb to TSS+64.4 kb,

[1991] (14) between TSS+64.4 kb to TSS+65 kb,

[1992] (15) between TSS+65 kb to TSS+65.1 kb,

[1993] (16) between TSS+65.1 kb to TSS+65.2 kb,

[1994] (17) between TSS+65.2 kb to TSS+65.3 kb,

[1995] (18) between TSS+65.3 kb to TSS+65.4 kb,

[1996] (19) between TSS+65.4 kb to TSS+65.5 kb,

[1997] (20) between TSS+65.5 kb to TSS+65.7 kb,

[1998] (21) between TSS+65.7 kb to TSS+65.8 kb,

[1999] (22) between TSS+65.8 kb to TSS+65.9 kb,

[2000] (23) between TSS+65.9 kb to TSS+66 kb,

[2001] (24) between TSS+66 kb to TSS+67 kb,

[2002] (25) between TSS+67 kb to TSS+68 kb,

[2003] (26) between TSS+68 kb to TSS+69 kb,

[2004] (27) between TSS+69 kb to TSS+70 kb,

[2005] (28) between TSS+70 kb to TSS+75 kb,

[2006] (29) between TSS+75 kb to TSS+80 kb, or

[2007] (30) between TSS+80 kb to TSS+84.4 kb.

[2008] While not wishing to be bound by theory, it is believed that the two double strand breaks allow for NHEJ-mediated deletion of erythroid enhancer in the BCL11A gene.

[2009] In an embodiment, the method comprises introducing a NHEJ-mediated deletion of a genomic sequence including the erythroid enhancer. As described herein, in one embodiment, the method comprises the introduction of two sets of breaks (e.g., one double strand break and a pair of single strand breaks)—one 5′ and the other 3′ to (i.e., flanking) the BT target position (e.g., the erythroid enhancer). Two gRNAs, e.g., unimolecular (or chimeric) or modular gRNA molecules, are configured to position the two sets of breaks (either the double strand break or the pair of single strand breaks) on opposite sides of the BT target knockdown position (e.g., the erythroid enhancer) in the BCL11A gene. In an embodiment, the first set of breaks (either the double strand break or the pair of single strand breaks) is positioned upstream of the the erythroid enhancer within intron 2 (e.g., between TSS+0.75 kb to TSS+52.0 kb), and the second set of breaks (either the double strand break or the pair of single strand breaks) is positioned downstream of the the erythroid enhancer within intron 2 (e.g., between TSS+64.4 kb to TSS+84.7 kb) (see FIG. 15). In an embodiment, the two sets of breaks (either the double strand break or the pair of single strand breaks) are positioned to remove a portion of the erythroid enhancer resulting in disruption of one or more DHSs. In an embodiment, the breaks (i.e., the two sets of breaks (either the double strand break or the pair of single strand breaks)) are positioned to avoid unwanted target chromosome elements, such as repeat elements, e.g., an Alu repeat, or the endogenous splice sites.

[2010] The first set of breaks (either the double strand break or the pair of single strand breaks) may be positioned as follows:
[2011] (1) upstream of the 5′ end of the erythroid enhancer in intron 2 (e.g., between TSS+0.75 kb to TSS+52.0 kb), or
[2012] (2) within the erythroid enhancer provided that a portion of the erythroid enhancer is removed resulting in disruption of one or more DHSs (e.g., between TSS+52.0 kb to TSS+64.4 kb),
   and the second set of breaks (either the double strand break or the pair of single strand breaks) to be paired with the first set of breaks (either the double strand break or the pair of single strand breaks) may be positioned as follows:
[2013] (3) downstream the 3′ end of the erythroid enhancer in intron 2 (e.g., between TSS+64.4 kb to TSS+84.7 kb), or
[2014] (4) within the erythroid enhancer provided that a portion of the erythroid enhancer is removed resulting in disruption of one or more DHSs (e.g., between TSS+52.0 kb to TSS+64.4 kb).

[2015] For example, the first set of breaks (either the double strand break or the pair of single strand breaks) may be positioned in the BCL11A gene:

[2016] (1) between TSS+0.75 kb to TSS+10 kb,

[2017] (2) between TSS+10 kb to TSS+20 kb,

[2018] (3) between TSS+20 kb to TSS+30 kb,

[2019] (4) between TSS+30 kb to TSS+40 kb,

[2020] (5) between TSS+40 kb to TSS+45 kb,

[2021] (6) between TSS+45 kb to TSS+47.5 kb,

[2022] (7) between TSS+47.5 kb to TSS+50 kb,

[2023] (8) between TSS+50 kb to TSS+51 kb,

[2024] (9) between TSS+51 kb to TSS+51.1 kb,

[2025] (10) between TSS+51.1 kb to TSS+51.2 kb,

[2026] (11) between TSS+51.2 kb to TSS+51.3 kb,

[2027] (12) between TSS+51.3 kb to TSS+51.4 kb,

[2028] (13) between TSS+51.4 kb to TSS+51.5 kb,

[2029] (14) between TSS+51.5 kb to TSS+51.6 kb,

[2030] (15) between TSS+51.6 kb to TSS+51.7 kb,

[2031] (16) between TSS+51.7 kb to TSS+51.8 kb,

[2032] (17) between TSS+51.8 kb to TSS+51.9 kb,

[2033] (18) between TSS+51.9 kb to TSS+52 kb,

[2034] (19) between TSS+52 kb to TSS+53 kb,

[2035] (20) between TSS+53 kb to TSS+54 kb,

[2036] (21) between TSS+54 kb to TSS+55 kb,

[2037] (22) between TSS+55 kb to TSS+56 kb,

[2038] (23) between TSS+56 kb to TSS+57 kb,

[2039] (24) between TSS+57 kb to TSS+58 kb,

[2040] (25) between TSS+58 kb to TSS+59 kb,

[2041] (26) between TSS+59 kb to TSS+60 kb,

[2042] (27) between TSS+60 kb to TSS+61 kb,

[2043] (28) between TSS+61 kb to TSS+62 kb,

[2044] (29) between TSS+62 kb to TSS+63 kb,

[2045] (30) between TSS+63 kb to TSS+64 kb, or

[2046] (31) between TSS+64 kb to TSS+64.4 kb,

and the second set of breaks (either the double strand break or the pair of single strand breaks) to be paired with the first set of breaks (either the double strand break or the pair of single strand breaks)may be positioned in the BCL11A gene:

[2047] (1) between TSS+52 kb to TSS+53 kb,

[2048] (2) between TSS+53 kb to TSS+54 kb,

[2049] (3) between TSS+54 kb to TSS+55 kb,

[2050] (4) between TSS+55 kb to TSS+56 kb,

[2051] (5) between TSS+56 kb to TSS+57 kb,

[2052] (6) between TSS+57 kb to TSS+58 kb,

[2053] (7) between TSS+58 kb to TSS+59 kb,

[2054] (8) between TSS+59 kb to TSS+60 kb,

[2055] (9) between TSS+60 kb to TSS+61 kb,

[2056] (10) between TSS+61 kb to TSS+62 kb,

[2057] (11) between TSS+62 kb to TSS+63 kb,

[2058] (12) between TSS+63 kb to TSS+64 kb,

[2059] (13) between TSS+64 kb to TSS+64.4 kb,

[2060] (14) between TSS+64.4 kb to TSS+65 kb,

[2061] (15) between TSS+65 kb to TSS+65.1 kb,

[2062] (16) between TSS+65.1 kb to TSS+65.2 kb,

[2063] (17) between TSS+65.2 kb to TSS+65.3 kb,

[2064] (18) between TSS+65.3 kb to TSS+65.4 kb,

[2065] (19) between TSS+65.4 kb to TSS+65.5 kb,

[2066] (20) between TSS+65.5 kb to TSS+65.7 kb,

[2067] (21) between TSS+65.7 kb to TSS+65.8 kb,

[2068] (22) between TSS+65.8 kb to TSS+65.9 kb,

[2069] (23) between TSS+65.9 kb to TSS+66 kb,

[2070] (24) between TSS+66 kb to TSS+67 kb,

[2071] (25) between TSS+67 kb to TSS+68 kb,

[2072] (26) between TSS+68 kb to TSS+69 kb,

[2073] (27) between TSS+69 kb to TSS+70 kb,

[2074] (28) between TSS+70 kb to TSS+75 kb,

[2075] (29) between TSS+75 kb to TSS+80 kb, or

[2076] (30) between TSS+80 kb to TSS+84.4 kb.

[2077] While not wishing to be bound by theory, it is believed that the two sets of breaks (either the double strand break or the pair of single strand breaks) allow for NHEJ-mediated deletion of erythroid enhancer in the BCL11A gene.

[2078] In an embodiment, the method comprises introducing a NHEJ-mediated deletion of a genomic sequence including the erythroid enhancer. As described herein, in one embodiment, the method comprises the introduction of two sets of breaks (e.g., two pairs of single strand breaks)—one 5′ and the other 3′ to (i.e., flanking) the BT target position (e.g., the erythroid enhancer). Two gRNAs, e.g., unimolecular (or chimeric) or modular gRNA molecules, are configured to position the two sets of breaks on opposite sides of the BT target knockdown position (e.g., the erythroid enhancer) in the BCL11A gene. In an embodiment, the first set of breaks (i.e., the first pair of single strand breaks) is positioned upstream of the the erythroid enhancer within intron 2 (e.g., between TSS+0.75 kb to TSS+52.0 kb), and the second set of breaks (i.e., the second pair of single strand breaks) is positioned downstream of the the erythroid enhancer within intron 2 (e.g., between TSS+64.4 kb to TSS+84.7 kb) (see FIG. 15). In an embodiment, the two sets of breaks (e.g., two pairs of single strand breaks)) are positioned to remove a portion of the erythroid enhancer resulting in disruption of one or more DHSs. In an embodiment, the breaks (i.e., the two pairs of single strand breaks) are positioned to avoid unwanted target chromosome elements, such as repeat elements, e.g., an Alu repeat, or the endogenous splice sites.

[2079] The first pair of single strand breaks may be positioned as follows:
[2080] (1) upstream of the 5′ end of the erythroid enhancer in intron 2 (e.g., between TSS+0.75 kb to TSS+52.0 kb), or
[2081] (2) within the erythroid enhancer provided that a portion of the erythroid enhancer is removed resulting in disruption of one or more DHSs (e.g., between TSS+52.0 kb to TSS+64.4 kb),
   and the second pair of single strand breaks to be paired with the first pair of single strand breaks may be positioned as follows:
[2082] (3) downstream the 3′ end of the erythroid enhancer in intron 2 (e.g., between TSS+64.4 kb to TSS+84.7 kb), or
[2083] (4) within the erythroid enhancer provided that a portion of the erythroid enhancer is removed resulting in disruption of one or more DHSs (e.g., between TSS+52.0 kb to TSS+64.4 kb).

[2084] For example, the pair of single strand breaks may be positioned in the BCL11A gene:

[2085] (1) between TSS+0.75 kb to TSS+10 kb,

[2086] (2) between TSS+10 kb to TSS+20 kb,

[2087] (3) between TSS+20 kb to TSS+30 kb,

[2088] (4) between TSS+30 kb to TSS+40 kb,

[2089] (5) between TSS+40 kb to TSS+45 kb,

[2090] (6) between TSS+45 kb to TSS+47.5 kb,

[2091] (7) between TSS+47.5 kb to TSS+50 kb,

[2092] (8) between TSS+50 kb to TSS+51 kb,

[2093] (9) between TSS+51 kb to TSS+51.1 kb,

[2094] (10) between TSS+51.1 kb to TSS+51.2 kb,

[2095] (11) between TSS+51.2 kb to TSS+51.3 kb,

[2096] (12) between TSS+51.3 kb to TSS+51.4 kb,

[2097] (13) between TSS+51.4 kb to TSS+51.5 kb,

[2098] (14) between TSS+51.5 kb to TSS+51.6 kb,

[2099] (15) between TSS+51.6 kb to TSS+51.7 kb,

[2100] (16) between TSS+51.7 kb to TSS+51.8 kb,

[2101] (17) between TSS+51.8 kb to TSS+51.9 kb,

[2102] (18) between TSS+51.9 kb to TSS+52 kb,

[2103] (19) between TSS+52 kb to TSS+53 kb,

[2104] (20) between TSS+53 kb to TSS+54 kb,

[2105] (21) between TSS+54 kb to TSS+55 kb,

[2106] (22) between TSS+55 kb to TSS+56 kb,

[2107] (23) between TSS+56 kb to TSS+57 kb,

[2108] (24) between TSS+57 kb to TSS+58 kb,

[2109] (25) between TSS+58 kb to TSS+59 kb,

[2110] (26) between TSS+59 kb to TSS+60 kb,

[2111] (27) between TSS+60 kb to TSS+61 kb,

[2112] (28) between TSS+61 kb to TSS+62 kb,

[2113] (29) between TSS+62 kb to TSS+63 kb,

[2114] (30) between TSS+63 kb to TSS+64 kb, or

[2115] (31) between TSS+64 kb to TSS+64.4 kb,

and the second pair of single strand breaks to be paired with the first pair of single strand breaks may be positioned in the BCL11A gene:

[2116] (1) between TSS+52 kb to TSS+53 kb,

[2117] (2) between TSS+53 kb to TSS+54 kb,

[2118] (3) between TSS+54 kb to TSS+55 kb,

[2119] (4) between TSS+55 kb to TSS+56 kb,

[2120] (5) between TSS+56 kb to TSS+57 kb,

[2121] (6) between TSS+57 kb to TSS+58 kb,

[2122] (7) between TSS+58 kb to TSS+59 kb,

[2123] (8) between TSS+59 kb to TSS+60 kb,

[2124] (9) between TSS+60 kb to TSS+61 kb,

[2125] (10) between TSS+61 kb to TSS+62 kb,

[2126] (11) between TSS+62 kb to TSS+63 kb,

[2127] (12) between TSS+63 kb to TSS+64 kb,

[2128] (13) between TSS+64 kb to TSS+64.4 kb,

[2129] (14) between TSS+64.4 kb to TSS+65 kb,

[2130] (15) between TSS+65 kb to TSS+65.1 kb,

[2131] (16) between TSS+65.1 kb to TSS+65.2 kb,

[2132] (17) between TSS+65.2 kb to TSS+65.3 kb,

[2133] (18) between TSS+65.3 kb to TSS+65.4 kb,

[2134] (19) between TSS+65.4 kb to TSS+65.5 kb,

[2135] (20) between TSS+65.5 kb to TSS+65.7 kb,

[2136] (21) between TSS+65.7 kb to TSS+65.8 kb,

[2137] (22) between TSS+65.8 kb to TSS+65.9 kb,

[2138] (23) between TSS+65.9 kb to TSS+66 kb,

[2139] (24) between TSS+66 kb to TSS+67 kb,

[2140] (25) between TSS+67 kb to TSS+68 kb,

[2141] (26) between TSS+68 kb to TSS+69 kb,

[2142] (27) between TSS+69 kb to TSS+70 kb,

[2143] (28) between TSS+70 kb to TSS+75 kb,

[2144] (29) between TSS+75 kb to TSS+80 kb, or

[2145] (30) between TSS+80 kb to TSS+84.4 kb.

[2146] While not wishing to be bound by theory, it is believed that the two sets of breaks (e.g., the two pair of single strand breaks) allow for NHEJ-mediated deletion of erythroid enhancer in the BCL11A gene.

[2147] Knocking Down the BCL11A Gene Mediated by Enzymatically Inactive Cas9 (eiCas9) or an eiCas9-Fusion Protein by Targeting the Promoter Region of the Gene

[2148] A targeted knockdown approach reduces or eliminates expression of functional BCL11A gene product. As described herein, in an embodiment, a targeted knockdown is mediated by targeting an enzymatically inactive Cas9 (eiCas9) or an eiCas9 fused to a transcription repressor domain or chromatin modifying protein to alter transcription, e.g., to block, reduce, or decrease transcription, of the BCL11A gene.

[2149] Methods and compositions discussed herein may be used to alter the expression of the BCL11A gene to treat or prevent BT by targeting a promoter region of the BCL11A gene. In an embodiment, the promoter region, e.g., at least 2 kb, at least 1.5 kb, at least 1.0 kb, or at least 0.5 kb upstream or downstream of the TSS is targeted to knockdown expression of the BCL11A gene. In an embodiment, the methods and compositions discussed herein may be used to knock down the BCL11A gene to treat or prevent BT by targeting 0.5 kb upstream or downstream of the TSS. A targeted knockdown approach reduces or eliminates expression of functional BCL11A gene product. As described herein, in an embodiment, a targeted knockdown is mediated by targeting an enzymatically inactive Cas9 (eiCas9) or an eiCas9 fused to a transcription repressor domain or chromatin modifying protein to alter transcription, e.g., to block, reduce, or decrease transcription, of the BCL11A gene.

[2150] Other Embodiments Involving Circulating Blood Cells and BCL11A Gene (BT)

[2151] In an embodiment, methods and compositions discussed herein, can be used to treat or prevent BT, or its symptoms, e.g., by altering the BCL11A gene (also known as B-cell CLL/lymphoma 11A, BCL11A-L, BCL11A-S, BCL11A XL, CTIP1, HBFQTL5 and ZNF). BCL11A encodes a zinc-finger protein that is involved in the regulation of globin gene expression. By altering the BCL11A gene (e.g., one or both alleles of the BCL11A gene), the levels of gamma globin can be increased. Gamma globin can replace beta globin in the hemoglobin complex and effectively carry oxygen to tissues, thereby ameliorating BT disease phenotypes.

[2152] In one aspect, methods and compositions discussed herein may be used to alter the BCL11A gene to treat or prevent BT, by targeting the BCL11A gene, e.g., coding or non-coding regions of the BCL11A gene. Altering the BCL11A gene herein refers to reducing or eliminating (1) BCL11A gene expression, (2) BCL11A protein function, or (3) the level of BCL11A protein.

[2153] In an embodiment, the coding region (e.g., an early coding region) of the BCL11A gene is targeted for alteration. In an embodiment, a non-coding sequence (e.g., an enhancer region, a promoter region, an intron, 5′UTR, 3′UTR, or polyadenylation signal) is targeted for alteration.

[2154] In an embodiment, the method provides an alteration that comprises disrupting the BCL11A gene by the insertion or deletion of one or more nucleotides mediated by Cas9 (e.g., enzymatically active Cas9 (eaCas9), e.g., Cas9 nuclease or Cas9 nickase) as described below. This type of alteration is also referred to as “knocking out” the BCL11A gene.

[2155] In another embodiment, the method provides an alteration that does not comprise nucleotide insertion or deletion in the BCL11A gene and is mediated by enzymatically inactive Cas9 (eiCas9) or an eiCas9-fusion protein, as described below. This type of alteration is also referred to as “knocking down” the BCL11A gene.

[2156] In an embodiment, the methods and compositions discussed herein may be used to alter the BCL11A gene to treat or prevent BT by knocking out one or both alleles of the BCL11A gene. In an embodiment, the coding region (e.g., an early coding region) of the BCL11A gene, is targeted to alter the gene. In an embodiment, a non-coding region of the BCL11A gene (e.g., an enhancer region, a promoter region, an intron, 5′ UTR, 3′UTR, polyadenylation signal) is targeted to alter the gene. In an embodiment, an enhancer (e.g., a tissue-specific enhancer, e.g., a myeloid enhancer, e.g., an erythroid enhancer) is targeted to alter the gene. BCL11A erythroid enhancer comprises an approximate 12.4 kb fragment of BCL11A intron 2, located between approximate +52.0 to +64.4 kilobases (kb) from the Transcription Start Site (TSS+52 kb to TSS+64.4 kb, see FIG. 15). It's also referred to herein as chromosome 2 location 60,716,189-60,728,612 (according to UCSC Genome Browser hg 19 human genome assembly). Three deoxyribonuclese I hypersensitive sites (DHSs), TSS+62 kb, TSS+58 kb and TSS+55 kb are located in this region. Deoxyribonuclease I sensitivity is a marker for gene regulatory elements. While not wishing to be bound by theory, it's believed that deleting the enhancer region (e.g., TSS+52 kb to TSS+64.4 kb) may reduce or eliminate BCL11A expression in erythroid precursors which leads to gamma globin depression while sparing BCL11A expression in nonerythroid lineages. In an embodiment, the method provides an alteration that comprises a deletion of the enhancer region (e.g., a tissue-specific enhancer, e.g., a myleloid enhancer, e.g., an erythroid enhancer) or a protion of the region resulting in disruption of one or more DNase 1-hypersensitivie sites (DHS). In an embodiment, the method provides an alteration that comprises an insertion or deletion of one or more nucleotides. As described herein, in an embodiment, a targeted knockout approach is mediated by non-homologous end joining (NHEJ) using a CRISPR/Cas system comprising an enzymatically active Cas9 (eaCas9). In an embodiment, a targeted knockout approach alters the BCL11A gene. In an embodiment, a targeted knockout approach reduces or eliminates expression of functional BCL11A gene product. In an embodiment, targeting affects one or both alleles of the BCL11A gene. In an embodiment, an enhancer disruption approach reduces or eliminates expression of functional BCL11A gene product in the erythroid lineage.

[2157] “BT target knockout position”, as used herein, refers to a position in the BCL11A gene, which if altered, e.g., disrupted by insertion or deletion of one or more nucleotides, e.g., by NHEJ-mediated alteration, results in alteration of the BCL11A gene. In an embodiment, the position is in the BCL11A coding region, e.g., an early coding region. In an embodiment, the position is in a BCL11A non-coding region, e.g., an enhancer region.

[2158] In an embodiment, methods and compositions discussed herein, provide for altering (e.g., knocking out) the BCL11A gene. In an embodiment, knocking out the BCL11A gene herein refers to (1) insertion or deletion (e.g., NHEJ-mediated insertion or deletion) of one or more nucleotides in close proximity to or within the early coding region of the BCL11A gene, or (2) deletion (e.g., NHEJ-mediated deletion) of genomic sequence including the erythroid enhancer of the BCL11A gene. Both approaches give rise to alteration of the BCL11A gene as described above. In an embodiment, the BT target knockout position is altered by genome editing using the CRISPR/Cas9 system. The BT target knockout position may be targeted by cleaving with either a single nuclease or dual nickases, e.g., to induce insertion or deletion (e.g., NHEJ-mediated insertion or deletion) of one or more nucleotides in close proximity to or within the early coding region of the BT target knockout position or to delete (e.g., mediated by NHEJ) a genomic sequence including the erythroid enhancer of the BCL11A gene.

[2159] In an embodiment, the methods and compositions described herein introduce one or more breaks in close proximity to or within the early coding region in at least one allele of the BCL11A gene. In an embodiment, a single strand break is introduced in close proximity to or within the early coding region in at least one allele of the BCL11A gene. In an embodiment, the single strand break will be accompanied by an additional single strand break, positioned by a second gRNA molecule.

[2160] In an embodiment, a double strand break is introduced in close proximity to or within the early coding region in at least one allele of the BCL11A gene. In an embodiment, a double strand break will be accompanied by an additional single strand break positioned by a second gRNA molecule. In an embodiment, a double strand break will be accompanied by two additional single strand breaks positioned by a second gRNA molecule and a third gRNA molecule.

[2161] In an embodiment, a pair of single strand breaks is introduced in close proximity to or within the early coding region in at least one allele of the BCL11A gene. In an embodiment, the pair of single strand breaks will be accompanied by an additional double strand break, positioned by a third gRNA molecule. In an embodiment, the pair of single strand breaks will be accompanied by an additional pair of single strand breaks positioned by a third gRNA molecule and a fourth gRNA molecule.

[2162] In an embodiment, two double strand breaks are introduced to flank the erythroid enhancer at the in the BCL11A gene (one 5′ and the other one 3′ to the erythroid enhancer) to remove (e.g., delete) the genomic sequence including the erythroid enhancer. It is contemplated herein that in an embodiment the deletion of the genomic sequence including the erythroid enhancer is mediated by NHEJ. In an embodiment, the breaks (i.e., the two double strand breaks) are positioned to avoid unwanted deletion of certain elements, such as endogenous splice sites. The breaks, i.e., two double strand breaks, can be positioned upstream and downstream of the erythroid enhancer, as discussed herein.

[2163] In an embodiment, two sets of breaks (e.g., one double strand break and a pair of single strand breaks) are introduced to flank the erythroid enhancer in the BCL11A gene (one set 5′ and the other set 3′ to the erythroid enhancer) to remove (e.g., delete) the genomic sequence including the erythroid enhancer. It is contemplated herein that in an embodiment the deletion of the genomic sequence including the erythroid enhancer is mediated by NHEJ. In an embodiment, the breaks (i.e., the double strand break and the pair of single strand breaks) are positioned to avoid unwanted deletion of certain chromosome elements, such as endogenous splice sites. The breaks, e.g., the double strand break and the pair of single strand breaks, can be positioned upstream and downstream of the erythroid enhancer, as discussed herein.

[2164] In an embodiment, two sets of breaks (e.g., two pairs of single strand breaks) are introduced to flank the erythroid enhancer at the BT target position in the BCL11A gene (one set 5′ and the other set 3′ to the erythroid enhancer) to remove (e.g., delete) the genomic sequence including the erythroid enhancer. It is contemplated herein that in an embodiment the deletion of the genomic sequence including the erythroid enhancer is mediated by NHEJ. In an embodiment, the breaks (i.e., the two pairs of single strand breaks) are positioned to avoid unwanted deletion of certain chromosome elements, such as endogenous splice sites. The breaks, e.g., the two pairs of single strand breaks, can be positioned upstream and downstream of the erythroid enhancer, as discussed herein.

[2165] In an embodiment, the methods and compositions discussed herein may be used to alter the BCL11A gene to treat or prevent BT by knocking down one or both alleles of the BCL11A gene. In one embodiment, the coding region of the BCL11A gene, is targeted to alter the gene. In another embodiment, a non-coding region (e.g., an enhancer region, the promoter region, an intron, 5′ UTR, 3′UTR, polyadenylation signal) of the BCL11A gene is targeted to alter the gene. In an embodiment, the promoter region of the BCL11A gene is targeted to knock down the expression of the BCL11A gene. A targeted knockdown approach alters, e.g., reduces or eliminates the expression of the BCL11A gene. As described herein, in an embodiment, a targeted knockdown is mediated by targeting an enzymatically inactive Cas9 (eiCas9) or an eiCas9 fused to a transcription repressor domain or chromatin modifying protein to alter transcription, e.g., to block, reduce, or decrease transcription, of the BCL11A gene.

[2166] “BT target knockdown position”, as used herein, refers to a position, e.g., in the BCL11A gene, which if targeted by an eiCas9 or an eiCas9 fusion described herein, results in reduction or elimination of expression of functional BCL11A gene product. In an embodiment, transcription is reduced or eliminated. In an embodiment, the position is in the BCL11A promoter sequence, In an embodiment, a position in the promoter sequence of the BCL11A gene is targeted by an enzymatically inactive Cas9 (eiCas9) or an eiCas9-fusion protein, as described herein.

[2167] In an embodiment, one or more gRNA molecule comprising a targeting domain configured to target an enzymatically inactive Cas9 (eiCas9) or an eiCas9 fusion protein (e.g., an eiCas9 fused to a transcription repressor domain), sufficiently close to a BT target knockdown position to reduce, decrease or repress expression of the BCL11A gene.

[2168] “BT target position”, as used herein, refers to any of a BT target knockout position, or BT target knockdown position.

[2169] In one aspect, disclosed herein is a gRNA molecule, e.g., an isolated or non-naturally occurring gRNA molecule, comprising a targeting domain which is complementary with a target domain from the BCL11A gene.

[2170] When two or more gRNAs are used to position two or more cleavage events, e.g., double strand or single strand breaks, in a target nucleic acid, it is contemplated that the two or more cleavage events may be made by the same or different Cas9 proteins. For example, when two gRNAs are used to position two double strand breaks, a single Cas9 nuclease may be used to create both double strand breaks. When two or more gRNAs are used to position two or more single stranded breaks (single strand breaks), a single Cas9 nickase may be used to create the two or more single strand breaks. When two or more gRNAs are used to position at least one double strand break and at least one single strand break, two Cas9 proteins may be used, e.g., one Cas9 nuclease and one Cas9 nickase. It is contemplated that when two or more Cas9 proteins are used that the two or more Cas9 proteins may be delivered sequentially to control specificity of a double strand versus a single strand break at the desired position in the target nucleic acid.

[2171] In an embodiment, the targeting domain of the first gRNA molecule and the targeting domain of the second gRNA molecule hybridize to the target domain through complementary base pairing to opposite strands of the target nucleic acid molecule. In an embodiment, the gRNA molecule and the second gRNA molecule are configured such that the PAMs are oriented outward.

[2172] In an embodiment, the targeting domain of a gRNA molecule is configured to avoid unwanted target chromosome elements, such as repeat elements, e.g., an Alu repeat, or the endogenous splice sites, in the target domain. The gRNA molecule may be a first, second, third and/or fourth gRNA molecule.

[2173] In an embodiment, the targeting domain of a gRNA molecule is configured to position a cleavage event sufficiently far from a preselected nucleotide, e.g., the nucleotide of a coding region, such that the nucleotide is not altered. In an embodiment, the targeting domain of a gRNA molecule is configured to position an intronic cleavage event sufficiently far from an intron/exon border, or naturally occurring splice signal, to avoid alteration of the exonic sequence or unwanted splicing events. The gRNA molecule may be a first, second, third and/or fourth gRNA molecule, as described herein.

[2174] In another embodiment, a position in the coding region, e.g., the early coding region, of the BCL11A gene is targeted, e.g., for knockout.

[2175] In an embodiment, the BT target knockout position is the BCL11A coding region, e.g., early coding region, and more than one gRNA is used to position breaks, e.g., two single strand breaks or two double strand breaks, or a combination of single strand and double strand breaks, e.g., to create one or more indels, in the target nucleic acid sequence.

[2176] In another embodiment, a position in the non-coding region, e.g., the enhancer region, of the BCL11A gene is targeted, e.g., for knockout.

[2177] In an embodiment, the targeting domain of the gRNA molecule is configured to target an enzymatically inactive Cas9 (eiCas9) or an eiCas9 fusion protein (e.g., an eiCas9 fused to a transcription repressor domain), sufficiently close to the BCL11A transcription start site (TSS) to reduce (e.g., block) transcription initiation, binding of one or more transcription enhancers or activators, and/or RNA polymerase. In an embodiment, the targeting domain is configured to target between 1000 bp upstream and 1000 bp downstream of the TSS of the BCL11A gene. One or more gRNA may be used to target an eiCas9 to the promoter region of the BCL11A gene.

[2178] In an embodiment, the BT target knockdown position is the BCL11A promoter region and more than one gRNA is used to position an eiCas9 or an eiCas9-fusion protein (e.g., an eiCas9-transcription repressor domain fusion protein), in the target nucleic acid sequence.

[2179] In an embodiment, two gRNAs are used to position two breaks, e.g., two single strand breaks, in the target nucleic acid sequence. In an embodiment, the targeting domain which is complementary with the BCL11A gene is 16 nucleotides or more in length. In an embodiment, the targeting domain is 16 nucleotides in length. In an embodiment, the targeting domain is 17 nucleotides in length. In another embodiment, the targeting domain is 18 nucleotides in length. In still another embodiment, the targeting domain is 19 nucleotides in length. In still another embodiment, the targeting domain is 20 nucleotides in length. In still another embodiment, the targeting domain is 21 nucleotides in length. In still another embodiment, the targeting domain is 22 nucleotides in length. In still another embodiment, the targeting domain is 23 nucleotides in length. In still another embodiment, the targeting domain is 24 nucleotides in length. In still another embodiment, the targeting domain is 25 nucleotides in length. In still another embodiment, the targeting domain is 26 nucleotides in length.

[2180] In an embodiment, the targeting domain comprises 16 nucleotides. In an embodiment, the targeting domain comprises 17 nucleotides. In an embodiment, the targeting domain comprises 18 nucleotides. In an embodiment, the targeting domain comprises 19 nucleotides. In an embodiment, the targeting domain comprises 20 nucleotides. In an embodiment, the targeting domain comprises 21 nucleotides. In an embodiment, the targeting domain comprises 22 nucleotides. In an embodiment, the targeting domain comprises 23 nucleotides. In an embodiment, the targeting domain comprises 24 nucleotides. In an embodiment, the targeting domain comprises 25 nucleotides. In an embodiment, the targeting domain comprises 26 nucleotides.

[2181] In an embodiment, the gRNA, e.g., a gRNA comprising a targeting domain, which is complementary with the BCL11A gene, is a modular gRNA. In another embodiment, the gRNA is a unimolecular or chimeric gRNA.

[2182] A gRNA as described herein may comprise from 5′ to 3′: a targeting domain (comprising a “core domain”, and optionally a “secondary domain”); a first complementarity domain; a linking domain; a second complementarity domain; a proximal domain; and a tail domain. In an embodiment, the proximal domain and tail domain are taken together as a single domain.

[2183] In an embodiment, a gRNA comprises a linking domain of no more than 25 nucleotides in length; a proximal and tail domain, that taken together, are at least 20 nucleotides in length; and a targeting domain equal to or greater than 16, 17, 18, 19, 20, 21, 22, 23, 24, 25 or 26 nucleotides in length.

[2184] In another embodiment, a gRNA comprises a linking domain of no more than 25 nucleotides in length; a proximal and tail domain, that taken together, are at least 30 nucleotides in length; and a targeting domain equal to or greater than 16, 17, 18, 19, 20, 21, 22, 23, 24, 25 or 26 nucleotides in length.

[2185] In another embodiment, a gRNA comprises a linking domain of no more than 25 nucleotides in length; a proximal and tail domain, that taken together, are at least 30 nucleotides in length; and a targeting domain equal to or greater than 16, 17, 18, 19, 20, 21, 22, 23, 24, 25 or 26 nucleotides in length.

[2186] In another embodiment, a gRNA comprises a linking domain of no more than 25 nucleotides in length; a proximal and tail domain, that taken together, are at least 40 nucleotides in length; and a targeting domain equal to or greater than 16, 17, 18, 19, 20, 21, 22, 23, 24, 25 or 26 nucleotides in length.

[2187] A cleavage event, e.g., a double strand or single strand break, is generated by a Cas9 molecule. The Cas9 molecule may be an enzymatically active Cas9 (eaCas9) molecule, e.g., an eaCas9 molecule that forms a double strand break in a target nucleic acid or an eaCas9 molecule forms a single strand break in a target nucleic acid (e.g., a nickase molecule). Alternatively, In an embodiment, the Cas9 molecule may be an enzymatically inactive Cas9 (eiCas9) molecule or a modified eiCas9 molecule, e.g., the eiCas9 molecule is fused to Kruppel-associated box (KRAB) to generate an eiCas9-KRAB fusion protein molecule.

[2188] In an embodiment, the eaCas9 molecule catalyzes a double strand break.

[2189] In an embodiment, the eaCas9 molecule comprises HNH-like domain cleavage activity but has no, or no significant, N-terminal RuvC-like domain cleavage activity. In this case, the eaCas9 molecule is an HNH-like domain nickase, e.g., the eaCas9 molecule comprises a mutation at D10, e.g., D10A. In another embodiment, the eaCas9 molecule comprises N-terminal RuvC-like domain cleavage activity but has no, or no significant, HNH-like domain cleavage activity. In this instance, the eaCas9 molecule is an N-terminal RuvC-like domain nickase, e.g., the eaCas9 molecule comprises a mutation at H840, e.g., H840A. In an embodiment, the eaCas9 molecule is an N-terminal RuvC-like domain nickase, e.g., the eaCas9 molecule comprises a mutation at N863, e.g., N863A.

[2190] In an embodiment, a single strand break is formed in the strand of the target nucleic acid to which the targeting domain of said gRNA is complementary. In another embodiment, a single strand break is formed in the strand of the target nucleic acid other than the strand to which the targeting domain of said gRNA is complementary.

[2191] In another aspect, disclosed herein is a composition comprising (a) a gRNA molecule comprising a targeting domain that is complementary with a target domain in the BCL11A gene, as described herein. The composition of (a) may further comprise (b) a Cas9 molecule, e.g., a Cas9 molecule as described herein. A composition of (a) and (b) may further comprise (c) a second, third and/or fourth gRNA molecule, e.g., a second, third and/or fourth gRNA molecule described herein.

[2192] In another aspect, disclosed herein is a method of altering a cell, e.g., altering the structure, e.g., altering the sequence, of a target nucleic acid of a cell, comprising contacting said cell with: (a) a gRNA that targets the BCL11A gene, e.g., a gRNA as described herein; (b) a Cas9 molecule, e.g., a Cas9 molecule as described herein; and optionally, (c) a second, third and/or fourth gRNA that targets BCL11A gene, e.g., a gRNA, as described herein.

[2193] In an embodiment, the method comprises contacting said cell with (a) and (b).

[2194] In an embodiment, the method comprises contacting said cell with (a), (b), and (c).

[2195] In an embodiment, the method comprises contacting a cell from a subject suffering from or likely to develop BT. The cell may be from a subject that would benefit from having a mutation at a BT target position.

[2196] In an embodiment, the cell being contacted in the disclosed method is an erythroid cell. The contacting may be performed ex vivo and the contacted cell may be returned to the subject's body after the contacting step.

[2197] In an embodiment, the method of altering a cell as described herein comprises acquiring knowledge of the sequence of a BT target position in said cell, prior to the contacting step. Acquiring knowledge of the sequence of a BT target position in the cell may be by sequencing the BCL11A gene, or a portion of the BCL11A gene.

[2198] In an embodiment, contacting comprises delivering to the cell a Cas9 molecule of (b), as a protein or an mRNA, said gRNA of (a), as an RNA, and optionally said second gRNA of (c), as an RNA.

[2199] In an embodiment, contacting comprises delivering to the cell a gRNA of (a) as an RNA, optionally said second gRNA of (c) as an RNA, and a nucleic acid that encodes the Cas9 molecule of (b).

[2200] In another aspect, disclosed herein is a method of treating a subject suffering from or likely to develop BT, e.g., altering the structure, e.g., sequence, of a target nucleic acid of the subject, comprising contacting a cell from the subject with:

[2201] (a) a gRNA that targets the BCL11A gene, e.g., a gRNA disclosed herein;

[2202] (b) a Cas9 molecule, e.g., a Cas9 molecule disclosed herein; and

[2203] optionally, (c)(i) a second gRNA that targets the BCL11A gene, e.g., a second gRNA disclosed herein, and

[2204] further optionally, (c)(ii) a third gRNA, and still further optionally, (c)(iii) a fourth gRNA that target the BCL11A gene, e.g., a third and fourth gRNA disclosed herein.

[2205] In an embodiment, contacting comprises contacting with (a) and (b).

[2206] In an embodiment, contacting comprises contacting with (a), (b), and (c)(i).

[2207] In an embodiment, contacting comprises contacting with (a), (b), (c)(i) and (c)(ii).

[2208] In an embodiment, contacting comprises contacting with (a), (b), (c)(i), (c)(ii) and (c)(iii).

[2209] In an embodiment, the method comprises acquiring knowledge of the sequence at a BT target position in said subject.

[2210] In an embodiment, the method comprises acquiring knowledge of the sequence at a BT target position in said subject by sequencing the BCL11A gene or a portion of the BCL11A gene.

[2211] In an embodiment, the method comprises inducing a mutation at a BT target position.

[2212] In an embodiment, the method comprises inducing a mutation at a BT target position by NHEJ.

[2213] In an embodiment, a cell of the subject is contacted ex vivo with (a), (b), and optionally (c). In an embodiment, said cell is returned to the subject's body.

[2214] In an embodiment, contacting comprises delivering to said subject said Cas9 molecule of (b), as a protein or mRNA, and a nucleic acid which encodes (a), and optionally (c).

[2215] In an embodiment, contacting comprises delivering to the subject the Cas9 molecule of (b), as a protein or mRNA, the gRNA of (a), as an RNA, and optionally the second gRNA of (c), as an RNA.

[2216] In an embodiment, contacting comprises delivering to the subject the gRNA of (a), as an RNA, optionally said second gRNA of (c), as an RNA, a nucleic acid that encodes the Cas9 molecule of (b).

[2217] When the method comprises (1) inducing a mutation at a BT target position by NHEJ or (2) knocking down expression of the BCL11A gene, e.g., by targeting the promoter region, a Cas9 of (b) and at least one guide RNA, e.g., a guide RNA of (a) are included in the contacting step.

[2218] In an embodiment, a cell of the subject is contacted ex vivo with (a), (b) and optionally (c). In an embodiment, said cell is returned to the subject's body.

[2219] In an embodiment, contacting comprises delivering to said subject said Cas9 molecule of (b), as a protein or mRNA, and a nucleic acid which encodes (a) and optionally (c).

[2220] In an embodiment, contacting comprises delivering to the subject the Cas9 molecule of (b), as a protein or mRNA, the gRNA of (a), as an RNA, and optionally the second gRNA of (c), as an RNA.

[2221] In an embodiment, contacting comprises delivering to the subject the gRNA of (a), as an RNA, optionally said second gRNA of (c), as an RNA, and a nucleic acid that encodes the Cas9 molecule of (b).

[2222] In another aspect, disclosed herein is a reaction mixture comprising a, gRNA, a nucleic acid, or a composition described herein, and a cell, e.g., a cell from a subject having, or likely to develop BT, or a subject which would benefit from a mutation at a BT target position.

[2223] In another aspect, disclosed herein is a kit comprising, (a) gRNA molecule described herein, and one or more of the following:

[2224] (b) a Cas9 molecule, e.g., a Cas9 molecule described herein, or a nucleic acid or mRNA that encodes the Cas9;

[2225] (c)(i) a second gRNA molecule, e.g., a second gRNA molecule described herein;

[2226] (c)(ii) a third gRNA molecule, e.g., a second gRNA molecule described herein;

[2227] (c)(iii) a fourth gRNA molecule, e.g., a second gRNA molecule described herein.

[2228] The compositions, reaction mixtures and kits, as disclosed herein, can also include a governing gRNA molecule, e.g., a governing gRNA molecule disclosed herein.

[2229] VI.5 T Cells (e.g., Targeting CXCR4 Gene)

[2230] In one aspect, Cas9 molecules, gRNA molecules (e.g., Cas9 molecule/gRNA molecule complexes), and optionally donor template nucleic acids, Cas9 and gRNA molecules described herein can be delivered to a target cell. In an embodiment, the target cell is a circulating blood cell, e.g., a T cell (e.g., a CD4+ T cell, a CD8+ T cell, a helper T cell, a regulatory T cell, a cytotoxic T cell, a memory T cell, a T cell precursor or a natural killer T cell), a B cell (e.g., a progenitor B cell, a Pre B cell, a Pro B cell, a memory B cell, a plasma B cell), a monocyte, a megakaryocyte, a neutrophil, an eosinophil, a basophil, a mast cell, a reticulocyte, a lymphoid progenitor cell, a myeloid progenitor cell, a gut-associated lymphoid tissue (GALT) cell, a dendritic cell, a macrophage, a microglial cell,or a hematopoietic stem cell. In an embodiment, the target cell is a bone marrow cell, (e.g., a lymphoid progenitor cell, a myeloid progenitor cell, an erythroid progenitor cell, a hematopoietic stem cell, or a mesenchymal stem cell). In an embodiment, the target cell is a CD4+ T cell. In an embodiment, the target cell is a lymphoid progenitor cell (e.g. a common lymphoid progenitor (CLP) cell). In an embodiment, the target cell is a myeloid progenitor cell (e.g. a common myeloid progenitor (CMP) cell). In an embodiment, the target cell is a hematopoietic stem cell (e.g. a long term hematopoietic stem cell (LT-HSC), a short term hematopoietic stem cell (ST-HSC), a multipotent progenitor (MPP) cell, a lineage restricted progenitor (LRP) cell).

[2231] In an embodiment, the target cell is manipulated ex vivo by editing (e.g., introducing a mutation in) the CCR5 gene and/or modulating the expression of the CCR5 gene, and administered to the subject. In an embodiment, the target cell is manipulated ex vivo by editing (e.g., introducing a mutation in) the CXCR4 gene and/or modulating the expression of the CXCR4 gene, and administered to the subject. In an embodiment, the target cell is manipulated ex vivo by editing (e.g., introducing a mutation in) both the CCR5 and the CXCR4 gene and/or modulating the expression of the both the CCR5 and the CXCR4 gene, and administered to the subject. Sources of target cells for ex vivo manipulation may include, by way of example, the subject's blood, the subject's cord blood, or the subject's bone marrow. Sources of target cells for ex vivo manipulation may also include, by way of example, heterologous donor blood, cord blood, or bone marrow.

[2232] In an embodiment, a CD4+T cell is removed from the subject, manipulated ex vivo as described above, and the CD4+T cell is returned to the subject. In an embodiment, a lymphoid progenitor cell is removed from the subject, manipulated ex vivo as described above, and the lymphoid progenitor cell is returned to the subject. In an embodiment, a myeloid progenitor cell is removed from the subject, manipulated ex vivo as described above, and the myeloid progenitor cell is returned to the subject. In an embodiment, a hematopoietic stem cell is removed from the subject, manipulated ex vivo as described above, and the hematopoietic stem cell is returned to the subject.

[2233] A suitable cell can also include a stem cell such as, by way of example, an embryonic stem cell, an induced pluripotent stem cell, a hematopoietic stem cell, a neuronal stem cell and a mesenchymal stem cell. In an embodiment, the cell is an induced pluripotent stem cells (iPS) cell or a cell derived from an iPS cell, e.g., an iPS cell generated from the subject, modified as described above and differentiated into a clinically relevant cell such as e.g, a CD4+ T cell, a lymphoid progenitor cell, myeloid progenitor cell, a macrophage, dendritic cell, gut associated lymphoid tissue or a hematopoietic stem cell. In an embodiment, AAV is used to transduce the target cells, e.g., the target cells described herein.

[2234] In an embodiment, a cell is manipulated by altering or editing (e.g., introducing a mutation in) the CXCR4 gene, e.g., as described herein. In another embodiment, the expression of the CXCR4 gene is altered or modulated, e.g., ex vivo.

[2235] In an embodiment, a cell is manipulated by altering or editing (e.g., introducing a mutation in) both the CCR5 and the CXCR4 genes, e.g., as described herein. In another embodiment, the expression of both the CCR5 and the CXCR4 genes is altered or modulated, e.g., ex vivo.

[2236] VI.6 Hematopoietic Stem/Progenitor Cells (HSPCs) (e.g., Targeting CXCR4 Gene)

[2237] In an embodiment, Cas9 molecules, gRNA molecules (e.g., Cas9 molecule/gRNA molecule complexes), and optionally donor template nucleic acids,the Cas9 and gRNA molecules described herein can be delivered to a target cell. In an embodiment, the target cell is a circulating blood cell, e.g., a reticulocyte, a myeloid progenitor cell, a lymphoid progenitor cell, a hematopoietic stem/progenitor cell, or an endothelial cell. In an embodiment, the target cell is a bone marrow cell (e.g., a myeloid progenitor cell, e.g., a lymphoid progenitor cell, e.g., an erythroid progenitor cell, e.g., a hematopoietic stem/progenitor cell, e.g., an endothelial cell, e.g., a mesenchymal stem cell). In an embodiment, the target cell is a myeloid progenitor cell (e.g. a common myeloid progenitor (CMP) or a granulocyte macrophage progenitor (GMP) cell). In an embodiment, the target cell is a lymphoid progenitor cell, e.g., a common lymphoid progenitor (CLP). In an embodiment, the target cell is an erythroid progenitor cell (e.g. a megakaryocyte erythroid progenitor (MEP) cell). In an embodiment, the target cell is a hematopoietic stem/progenitor cell (e.g. a long term hematopoietic stem/progenitor cell (LT-HSPC), a short term hematopoietic stem/progenitor cell (ST-HSPC), a multipotent progenitor (MPP) cell, a lineage restricted progenitor (LRP) cell). In an embodiment, the target cell is a CD34⁺ cell, a CD34⁺CD90⁺ cell, a CD34⁺CD38⁻ cell, a CD34⁺CD90⁺CD49f⁺CD38⁻CD45RA⁻ cell, a CD105⁻ cell, a CD31⁺, or a CD133⁺ cell. In an embodiment, the target cell is a an umbilical cord blood CD34⁺ HSPC, an umbilical cord venous endothelial cell, an umbilical cord arterial endothelial cells, an amniotic fluid CD34⁺ cell, an amniotic fluid endothelial cell, a placental endothelial cell or a placental hematopoietic CD34⁺ cell. In an embodiment, the target cell is a mobilized peripheral blood hematopoietic CD34⁺ cell (after the patient is treated with a mobilization agent, e.g., G-CSF or Plerixafor). In an embodiment, the target cell is a peripheral blood endothelial cell.

[2238] In an embodiment, the target cell is manipulated ex vivo and administered to a subject. Sources of target cells for ex vivo manipulation may include, by way of example, the subject's blood, cord blood, or the subject's bone marrow. Sources of target cells for ex vivo manipulation may also include, by way of example, heterologous donor blood, cord blood, or bone marrow.

[2239] In an embodiment, a myeloid progenitor cell is removed from the subject, manipulated ex vivo as described above, and the myeloid progenitor cell is returned to the subject. In an embodiment, an erythroid progenitor cell is removed from the subject, manipulated ex vivo as described above, and the erythroid progenitor cell is returned to the subject. In an embodiment, a lymphoid progenitor cell is removed from the subject, manipulated ex vivo as described above, and the lymphoid progenitor cell is returned to the subject. In an embodiment, a multipotent progenitor cell is removed from the subject, manipulated ex vivo as described above, and the hematopoietic stem cell is returned to the subject. In an embodiment, a hematopoietic stem/progenitor cell is removed from the subject, manipulated ex vivo as described above, and the hematopoietic stem/progenitor cell is returned to the subject. In an embodiment, a CD34⁺ hematopoietic stem cell is removed from the subject, manipulated ex vivo as described above, and the CD34⁺ hematopoietic stem/progenitor cell is returned to the subject.

[2240] A suitable cell can also include a stem cell such as, by way of example, an embryonic stem cell, an induced pluripotent stem cell, a hematopoietic stem cell, an endothelial cell, a hemogenic endothelial cell, and a mesenchymal stem cell. In an embodiment, the cell is an induced pluripotent stem (iPS) cell or a cell derived from an iPS cell, e.g., an iPS cell generated from the subject, modified to induce a mutation and differentiated into a clinically relevant cell such as a myeloid progenitor cell, a lymphoid progenitor cell, an erythroid progenitor cell, a multipotent progenitor cell, or a hematopoietic stem/progenitor cell. A suitable cell can also include an endothelial cell or amniotic cell that is differentiated into a hematopoietic stem cell.

[2241] In an embodiment, a viral vector is used to transduce the target cell. In an embodiment, AAV (e.g., AAV6 and AAVDJ) is used to transduce the target cell. In an embodiment, a lentivirus vector or an integration deficient lentivirus vector is used to transduce the target cell. In an embodiment, a ribonucleic acid (e.g., a gRNA molecule and an mRNA encoding a Cas9 molecule) is used to transfect the target cell. In an embodiment, a protein (e.g., a Cas9 molecule) and a ribonucleic acid (e.g., a gRNA molecule) are used to transfect the target cell. In an embodiment, a ribonucleoprotein complex (e.g., a Cas9 molecule/gRNA molecule complex) is used to transfect the target cell. In an embodiment, a deoxyribonucleic acid (e.g., a DNA encoding a gRNA molecule, a Cas9 molecule, or both) is used to transfect the target cells.

[2242] Cells produced by the methods described herein may be used immediately. Alternatively, the cells may be frozen (e.g., in liquid nitrogen) and stored for later use. The cells will usually be frozen in 10% dimehtylsulfoxide (DMSO), 50% serum, 40% buffered medium, or some other such solution as is commonly used in the art to preserve cells at such freezing temperature and thawed in such a manner as commonly known in the art for thawing frozen cultured cells.

[2243] Human Immunodeficiency Virus

[2244] Human Immunodeficiency Virus (HIV) is a virus that causes severe immunodeficiency. In the United States, more than 1 million people are infected with the virus. Worldwide, approximately 30-40 million people are infected.

[2245] HIV is a single-stranded RNA virus that preferentially infects CD4 cells. The virus binds to receptors on the surface of CD4+ cells to enter and infect these cells. This binding and infection step is vital to the pathogenesis of HIV. The virus attaches to the CD4 receptor on the cell surface via its own surface glycoproteins, gp120 and gp41. These proteins are made from the cleavage product of gp160. Gp120 binds to a CD4 receptor and must also bind to another coreceptor in order for the virus to enter the host cell. In macrophage-(M-tropic) viruses, the coreceptor is CCR5 occassionaly referred to as the CCR5 receptor. M-tropic virus is found most commonly in the early stages of HIV infection.

[2246] There are two types of HIV-HIV-1 and HIV-2. HIV-1 is the predominant global form and is a more virulent strain of the virus. HIV-2 has lower rates of infection and, at present, predominantly affects populations in West Africa. HIV is transmitted primarily through sexual exposure, although the sharing of needles in intravenous drug use is another mode of transmission.

[2247] As HIV infection progresses, the virus infects CD4 cells and a subject's CD4 counts fall. With declining CD4 counts, a subject is subject to increasing risk of opportunistic infections (OI). Severely declining CD4 counts are associated with a very high likelihood of OIs, specific cancers (such as Kaposi's sarcoma, Burkitt's lymphoma) and wasting syndrome. Normal CD4 counts are between 600-1200 cells/microliter.

[2248] Untreated HIV infection is a chronic, progressive disease that leads to acquired immunodeficiency syndrome (AIDS) and death in the vast majority of subjects. Diagnosis of AIDS is made based on infection with a variety of opportunistic pathogens, presence of certain cancers and/or CD4 counts below 200 cells/μL.

[2249] HIV was untreatable and invariably led to death until the late 1980's. Since then, antiretroviral therapy (ART) has dramatically slowed the course of HIV infection. Highly active antiretroviral therapy (HAART) is the use of three or more agents in combination to slow HIV. Antiretroviral therapy (ART) is indicated in a subject whose CD4 counts has dropped below 500 cells/μL. Viral load is the most common measurement of the efficacy of HIV treatment and disease progression. Viral load measures the amount of HIV RNA present in the blood.

[2250] Treatment with HAART has significantly altered the life expectancy of those infected with HIV. A subject in the developed world who maintains their HAART regimen can expect to live into their 60's and possibly 70's. However, HAART regimens are associated with significant, long term side effects. First, the dosing regimens are complex and associated with strict food requirements. Compliance rates with dosing can be lower than 50% in some populations in the United States. In addition, there are significant toxicities associated with HAART treatment, including diabetes, nausea, malaise, sleep disturbances. A subject who does not adhere to dosing requirements of HAART therapy may have return of viral load in their blood and are at risk for progression to disease and its associated complications.

[2251] In thymic-(T-tropic) viruses, the coreceptor is CXCR4. CXCR4 receptors are expressed by CD4 T cells, CD8 T cells, B cells, neutrophils and eosinophils. In the later stages of infection, 50-60% of subjects have T-tropic viruses that infect T cells through CXCR4 receptors. Subjects may be infected with M-tropic viruses, T-tropic viruses, and/or M- and T-tropic viruses.

[2252] Most initial HIV infections and early stage HIV is due to entry and propogation of M-tropic virus. CCR5-Δ32 mutation (also referred to as CCR5 delta 32 mutation) results in a non-functional CCR5 receptor that does not allow M-tropic HIV-1 virus entry. Individuals carrying two copies of the CCR5-Δ32 allele are resistant to HIV infection and CCR5-Δ32 heterozyous carriers have slow progression of the disease.

[2253] CCR5 antagonists (e.g. maraviroc) exist and are used in the treatment of HIV. However, current CCR5 antagonists decrease HIV progression but cannot cure the disease. In addition, there are considerable risks of side effects of these CCR5 antagonists, including severe liver toxicity.

[2254] As HIV progresses to later stage, the virus often becomes predominantly T-tropic. In later stage HIV infections, a slight majority of subjects have T-tropic viruses, which infect T cells via CXCR4 coreceptors. CXCR4 receptor tropism is associated with lower CD4 counts, and, often, later stage, more severe disease. There is no known protective mutation in the CXCR4 gene that is equivalent to the CCR5-Δ32 mutation.

[2255] In spite of considerable advances in the treatment of HIV, there remain considerable needs for agents that could prevent, treat, and eliminate HIV infection or AIDS. Therapies that are free from significant toxicities and involve a single or multi-dose regimen (versus current daily dose regimen for the lifetime of a patient) would be superior to current HIV treatment. A reduction or complete elimination of CCR5, CXCR4, or both CCR5 and CXCR4 gene expression in myeloid and lymphoid cells would prevent HIV infection and progression, and even cure the disease.

[2256] Other Embodiments Involving CXCR4 Genes

[2257] In an embodiment, methods and compositions discussed herein, allow for the prevention and treatment of HIV infection and AIDS, by gene editing, e.g., using CRISPR-Cas9 mediated methods to alter a CXCR4 gene. Altering the CXCR4 gene herein refers to reducing or eliminating (1) CXCR4 gene expression, (2) CXCR4 protein function, or (3) the level of CXCR4 protein. In an embodiment, altering the CXCR4 gene can be achieved by (1) knocking out the CXCR4 gene or (2) knocking down the CXCR4 gene. The CXCR4 gene is also known as CD184, D2S201E, FB22, HM89, HSY3RR, LAP-3, LAPS, LCR1, LESTR, NPY3R, NPYR, NPYRL, NPYY3R, WHIM or WHIMS.

[2258] In an embodiment, methods and compositions discussed herein, allow for the prevention and treatment of HIV infection and AIDS, by gene editing, e.g., using CRISPR-Cas9 mediated methods to alter each of two genes: the gene for C-C chemokine receptor type 5 (CCR5) and the gene for chemokine (C-X-C motif) receptor 4 (CXCR4). The alteration, of two or more genes (e.g., CCR5 and CRCX4) in the same cell or cells is referred to herein as “multiplexing”. Multiplexing constitutes the modification of at least two genes (e.g., CCR5 and CRCX4) in the same cell or cells.

[2259] Methods and compositions discussed herein, provide for prevention or reduction of HIV infection and/or prevention or reduction of the ability for HIV to enter host cells, e.g., in subjects who are already infected. Exemplary host cells for HIV include, but are not limited to, CD4 cells, CD8 cells, T cells, B cells, gut associated lymphatic tissue (GALT), macrophages, dendritic cells, myeloid progenitor cells, lymphoid progenitor cells, neutrophils, eosinophils, and microglia. Viral entry into the host cells requires interaction of the viral glycoproteins gp41 and gp120 with both the CD4 receptor and a co-receptor, e.g., CCR5, e.g., CXCR4. If a co-receptor, e.g., CCR5, e.g., CXCR4, is not present on the surface of the host cells, the virus cannot bind and enter the host cells. The progress of the disease is thus impeded. In an embodiment, by altering the CCR5 gene, e.g., introducing one or more mutations in the gene for C-C chemokine receptor type 5 (CCR5), e.g., by introducing a protective mutation (such as a CCR5 delta 32 mutation), knocking out the CCR5 gene or knocking down the CCR5 gene, entry of the HIV virus into the host cells is reduced or prevented. In an embodiment, by altering the CXCR4 gene, e.g., knocking out the CXCR4 gene or knocking down the CXCR4 gene, entry of the HIV virus into the host cells is reduced or prevented. In an embodiment, by multiplexing the alteration of both CCR5 and CXCR4, entry of the HIV virus into the host cells is reduced or prevented. Examplary multiplexing alterations of CCR5 and CXCR4 genes include, but are not limited to: introducing one or more mutations in the gene for C-C chemokine receptor type 5 (CCR5), e.g., by introducing a protective mutation (such as a CCR5 delta 32 mutation), and knocking out the CXCR4 gene, introducing one or more mutations in the gene for C-C chemokine receptor type 5 (CCR5), e.g., by introducing a protective mutation (such as a CCR5 delta 32 mutation), and knocking down the CXCR4 gene, knocking out both CCR5 and CXCR4 genes, knocking down both CCR5 and CXCR4 genes, knocking out the CCR5 gene and knocking down the CXCR4 gene, or knocking down the CCR5 gene and knocking out the CXCR4 gene.

[2260] In an embodiment, altering both CCR5 and CXCR4 genes in myeloid and lymphoid cells reduces or prevents HIV infection and/or treats HIV disease. While not wishing to be bound by theory, both T-tropic and M-tropic viral entry into myeloid and lymphoid cells are prevented or reduced by altering both CCR5 and CXCR4 genes. In an embodiment, a subject who has HIV and is treated with alteration of CCR5 and CXCR4 genes would be expected to clear HIV and effectively be cured. In an embodiment, a subject who does not yet have HIV and is treated with altering both CCR5 and CXCR4 genes would be expected to be immune to HIV.

[2261] In an embodiment, methods and compositions discussed herein, provide for treating or delaying the onset or progression of HIV infection or AIDS by gene editing, e.g., using CRISPR-Cas9 mediated methods to alter a CXCR4 gene. Altering the CXCR4 gene herein refers to reducing or eliminating (1) CXCR4 gene expression, (2) CXCR4 protein function, or (3) the level of CXCR4 protein.

[2262] In an embodiment, methods and compositions discussed herein, provide for treating or delaying the onset or progression of HIV infection or AIDS by gene editing, e.g., using CRISPR-Cas9 mediated methods to alter two genes in a single cell or cells, e.g., a CCR5 gene and a CXCR4 gene. Altering the CCR5 gene and the CXCR4 gene herein refers to reducing or eliminating (1) CCR5 and CXCR4 gene expression, (2) CCR5 and CXCR4 protein function, or (3) levels of CCR5 and CXCR4 protein.

[2263] “CCR5 target position”, as used herein, refers to any position that results in inactivation of the CCR5 gene. In an embodiment, a CCR5 target position refers to any of a CCR5 target knockout position or a CCR5 target knockdown position, as described herein.

[2264] “CXCR4 target position”, as used herein, refers to any position that results in inactivation of the CXCR4 gene. In an embodiment, a CXCR4 target position refers to any of a CXCR4 target knockout position or a CXCR4 target knockdown position, as described herein.

[2265] Methods to Treat or Prevent HIV Infection or AIDS

[2266] Methods and compositions described herein provide for a therapy, e.g., a one-time therapy, or a multi-dose therapy, that prevents or treats HIV infection and/or AIDS. In an embodiment, a disclosed therapy prevents, inhibits, or reduces the entry of HIV into CD4 cells of a subject who is already infected. In an embodiment, methods and compositions described herein prevent, inhibit, and/or reduce the entry of HIV into CD4 cells, CD8 cells, T cells, B cells, neutrophils, eosinophils, GALT, dendritic cells, microglia cells, myeloid progenitor cells, and/or lymphoid progenitor cells of a subject who is already infected. While not wishing to be bound by theory, in an embodiment, it is believed that knocking out CCR5 on CD4 cells, T cells, GALT, macrophages, dendritic cells, and microglia cells, renders the HIV virus unable to enter host immune cells. While not wishing to be bound by theory, in an embodiment, it is believed that knocking out CXCR4 on CD4 cells, CD8 cells, T cells, B cells, neutrophils and eosinophils renders the HIV virus unable to enter host immune cells. While not wishing to be bound by theory, in an embodiment, it is believed that knocking out both CCR5 and CXCR4 on CD4 cells, CD8 cells, T cells, B cells, neutrophils, eosinophils, GALT, dendritic cells, microglia cells, myeloid progenitor cells, and/or lymphoid progenitor cells renders the HIV virus unable to enter host immune cells.

[2267] Viral entry into CD4 cells, CD8 cells, T cells, B cells, neutrophils, eosinophils, GALT, dendritic cells, microglia cells, myeloid progenitor cells, and/or lymphoid progenitor cells requires interaction of the viral glycoproteins gp41 and gp120 with both the CD4 receptor and a coreceptor, e.g., CCR5, e.g., CXCR4. Once a functional coreceptor such as CCR5 and/or CXCR4 has been eliminated from the surface of the CD4 cells, CD8 cells, T cells, B cells, neutrophils, eosinophils, GALT, dendritic cells, microglia cells, myeloid progenitor cells, and/or lymphoid progenitor cells, the virus is prevented from binding and entering the host cells. In an embodiment, the disease does not progress or has delayed progression compared to a subject who has not received the therapy.

[2268] While not wishing to be bound by theory, subjects with naturally occurring CCR5 receptor mutations who have delayed HIV progression may confer protection by the mechanism of action described herein. Subjects with a specific deletion in the CCR5 gene (e.g., the delta 32 deletion) have been shown to have much higher likelihood of being long-term non-progressors (meaning they did not require HAART and their HIV infection did not progress). See, e.g., Stewart G J et al., 1997 The Australian Long-Term Non-Progressor Study Group. Aids.11:1833-1838. In addition, a subject who was CCR5+ (had a wild type CCR5 receptor) and infected with HIV underwent a bone marrow transplant for acute myeloid lymphoma. See, e.g., Hutter G et al., 2009N ENGL J MED. 360:692-698. The bone marrow transplant (BMT) was from a subject homozygous for a CCR5 delta 32 deletion. Following BMT, the subject did not have progression of HIV and did not require treatment with ART. These subjects offer evidence for the fact that introduction of a protective mutation of the CCR5 gene, or knockout or knockdown of the CCR5 gene prevents, delays or diminishes the ability of HIV to infect the subject. Mutation or deletion of the CCR5 gene, or reduced CCR5 gene expression, should therefore reduce the progression, virulence and pathology of HIV.

[2269] While not wishing to be bound by theory, knockout or knockdown of the CXCR4 gene will eliminate or reduce CXCR4 gene expression. Decreased expression of coreceptor CXCR4 on the surface of CD4 cells, CD8 cells, T cells, B cells, neutrophils and eosinophils will prevent, delay or diminish the ability of T-trophic HIV to infect the subject. Mutation or deletion of the CXCR4 gene, or reduced CXCR4 gene expression, should therefore reduce the progression, virulence and pathology of HIV.

[2270] While not wishing to be bound by theory, knockout or knockdown of both the CCR5 and CXCR4 gene will eliminate or reduce CCR5 and CXCR4 gene expression. Decreased expression of co-receptors CCR5 and CXCR4 on the surface of CD4 cells, CD8 cells, T cells, B cells, neutrophils, eosinophils, GALT, dendritic cells, microglia cells, myeloid progenitor cells, and/or lymphoid progenitor cells will prevent, delay or diminish the ability of both M-trophic and T-trophic HIV to infect the subject. Mutation or deletion of both the CCR5 and the CXCR4 genes, or reduced CCR5 and CXCR4 gene expression, should therefore reduce the progression, virulence and pathology of HIV.

[2271] In an embodiment, a method described herein is used to treat a subject having HIV.

[2272] In an embodiment, a method described herein is used to treat a subject having AIDS.

[2273] In an embodiment, a method described herein is used to prevent, or delay the onset or progression of, HIV infection and AIDS in a subject at high risk for HIV infection.

[2274] In an embodiment, a method described herein results in a selective advantage to survival of treated CD4 cells. In an embodiment, a method described herein results in a selective advantage to survival of treated CD8 cells, T cells, B cells, neutrophils, eosinophils, GALT, dendritic cells, microglia cells, myeloid progenitor cells, and/or lymphoid progenitor cells. In an embodiment, some proportion of CD4 cells, CD8 cells, T cells, B cells, neutrophils, eosinophils, myeloid progenitor cells, lymphoid progenitor cells, and/or hematopoietic stem cells will be modified and have a CXCR4 deletion mutation. In an embodiment, some proportion of CD4 cells, CD8 cells, T cells, B cells, neutrophils, eosinophils, myeloid progenitor cells, lymphoid progenitor cells, and/or hematopoietic stem cells will be modified and have a CXCR4 mutation that decreases CXCR4 gene expression.

[2275] In an embodiment, some proportion of CD4 cells, CD8 cells, T cells, B cells, neutrophils, eosinophils, GALT, dendritic cells, microglia cells, myeloid progenitor cells, lymphoid progenitor cells, and/or hematopoietic stem cells will be modified and have both a CCR5 protective mutation and a CXCR4 deletion mutation. In an embodiment, some proportion of CD4 cells, CD8 cells, T cells, B cells, neutrophils, eosinophils, GALT, dendritic cells, microglia cells, myeloid progenitor cells, lymphoid progenitor cells, and/or hematopoietic stem cells will be modified and have both a CCR5 protective mutation and a mutation that decreases CXCR4 gene expression.

[2276] In an embodiment, some proportion of CD4 cells, CD8 cells, T cells, B cells, neutrophils, eosinophils, GALT, dendritic cells, microglia cells, myeloid progenitor cells, lymphoid progenitor cells, and/or hematopoietic stem cells will be modified and have both a CCR5 deletion mutation and a CXCR4 deletion mutation. In an embodiment, some proportion of CD4 cells, CD8 cells, T cells, B cells, neutrophils, eosinophils, GALT, dendritic cells, microglia cells, myeloid progenitor cells, lymphoid progenitor cells, and/or hematopoietic stem cells will be modified and have both a CCR5 deletion mutation and a mutation that decreases CXCR4 gene expression.

[2277] In an embodiment, some proportion of CD4 cells, CD8 cells, T cells, B cells, neutrophils, eosinophils, GALT, dendritic cells, microglia cells, myeloid progenitor cells, lymphoid progenitor cells, and/or hematopoietic stem cells will be modified and have both a mutation that decreases CCR5 gene expression and a CXCR4 deletion mutation. In an embodiment, some proportion of CD4 cells, CD8 cells, T cells, B cells, neutrophils, eosinophils, GALT, dendritic cells, microglia cells, myeloid progenitor cells, lymphoid progenitor cells, and/or hematopoietic stem cells will be modified and have both a mutation that decreases CCR5 gene expression and a mutation that decreases CXCR4 gene expression. In an embodiment, these cells are not subject to infection with HIV. Cells that are not modified may be infected with HIV and are expected to undergo cell death. In an embodiment, after the treatment described herein, treated cells survive, while untreated cells die. In an embodiment, this selective advantage drives eventual colonization in all body compartments with 100% CCR5-negative CD4 cells, T cells, GALT, macrophages, dendritic cells, microglia cells, myeloid progenitor cells, lymphoid progenitor cells, and hematopoietic stem cells derived from treated cells, conferring complete protection in treated subjects against infection with M tropic HIV. In an embodiment, this selective advantage drives eventual colonization in all body compartments with 100% CXCR4-negative CD4 cells, CD8 cells, T cells, B cells, neutrophils, eosinophils, myeloid progenitor cells, lymphoid progenitor cells, and hematopoietic stem cells derived from treated cells, conferring complete protection in treated subjects against infection with T tropic HIV. In an embodiment, this selective advantage drives eventual colonization in all body compartments with 100% CCR5-negative and 100% CXCR4-negative CD4 cells, CD8 cells, T cells, B cells, neutrophils, eosinophils, GALT, dendritic cells, microglia cells, myeloid progenitor cells, lymphoid progenitor cells, and hematopoietic stem cells derived from treated cells, conferring complete protection in treated subjects against infection with both M tropic and T tropic HIV.

[2278] In an embodiment, the method comprises initiating treatment of a subject prior to disease onset.

[2279] In an embodiment, the method comprises initiating treatment of a subject after disease onset.

[2280] In an embodiment, the method comprises initiating treatment of a subject after disease onset, e.g., 1, 2, 3, 4, 5, 6, 7, 8, 9, 10, 12, 16, 24, 36, 48 or more months after onset of HIV infection or AIDS. While not wishing to be bound by theory, it is believed that this may be effective as disease progression is slow in some cases and a subject may present well into the course of illness.

[2281] In an embodiment, the method comprises initiating treatment of a subject in an advanced stage of disease, e.g., to slow viral replication and viral load.

[2282] Overall, initiation of treatment for a subject at all stages of disease is expected to prevent or reduce disease progression and benefit a subject.

[2283] In an embodiment, the method comprises initiating treatment of a subject prior to disease onset and prior to infection with HIV.

[2284] In an embodiment, the method comprises initiating treatment of a subject in an early stage of disease, e.g., when a subject has tested positive for HIV infection but has no signs or symptoms associated with HIV.

[2285] In an embodiment, the method comprises initiating treatment of a patient at the appearance of a reduced CD4 count or a positive HIV test.

[2286] In an embodiment, the method comprises treating a subject considered at risk for developing HIV infection.

[2287] In an embodiment, the method comprises treating a subject who is the spouse, partner, sexual partner, newborn, infant, or child of a subject with HIV.

[2288] In an embodiment, the method comprises treating a subject for the prevention or reduction of HIV infection.

[2289] In an embodiment, the method comprises treating a subject at the appearance of any of the following findings consistent with HIV: low CD4 count; opportunistic infections associated with HIV, including but not limited to: candidiasis, mycobacterium tuberculosis, cryptococcosis, cryptosporidiosis, cytomegalovirus; and/or malignancy associated with HIV, including but not limited to: lymphoma, Burkitt's lymphoma, or Kaposi's sarcoma.

[2290] In an embodiment, the method comprises treating a subject who is undergoing a heterologous hematopoietic stem cell transplant, including an umbilical cord blood transplant, e.g., in a subject with or without HIV.

[2291] In an embodiment, a cell is treated ex vivo and returned to a patient.

[2292] In an embodiment, an autologous CD4 cell can be treated ex vivo and returned to the subject. In an embodiment, an autologous CD8 cell, T cell, B cell, neutrophil, eosinophil, GALT, dendritic cell, microglia cell, myeloid progenitor cell, and/or lymphoid progenitor cell cell can be treated ex vivo and returned to the subject.

[2293] In an embodiment, a heterologous CD4 cell can be treated ex vivo and transplanted into the subject. In an embodiment, a heterologous CD8 cell, T cell, B cell, neutrophil, eosinophil, GALT, dendritic cell, microglia cell, myeloid progenitor cell, and/or lymphoid progenitor cell cell can be treated ex vivo and returned to the subject.

[2294] In an embodiment, an autologous stem cell, e.g., an autologous hematopoietic stem cell, e.g., an autologous umbilical cord blood transplant cell, can be treated ex vivo and returned to the subject.

[2295] In an embodiment, a heterologous stem cell, e.g., a heterologous hematopoietic stem cell, e.g., an autologous umbilical cord blood transplant cell, can be treated ex vivo and transplanted into the subject.

[2296] In an embodiment, the treatment comprises delivery of a gRNA molecule by a nanoparticle.

[2297] In an embodiment, treatment to eliminate or decrease CXCR4 gene expression is initiated after a subject is determined to have a mutation (e.g., an inactivating mutation, e.g., an inactivating mutation in either or both alleles) in CCR5 by genetic screening, e.g., genotyping, wherein the genetic testing was performed prior to or after disease onset.

[2298] Methods of Altering CXCR4

[2299] In one aspect, the methods and compositions discussed herein, inhibit or block a critical aspect of the HIV life cycle, i.e., CXCR4-mediated entry into T cells, i.e., CXCR4-mediated entry into B cells, by alteration (e.g., inactivation) of the CXCR4 gene. While not wishing to be bound by theory, exemplary mechanisms that can be associated with the alteration of the CXCR4 gene include, but are not limited to, non-homologous end joining (NHEJ) (e.g., classical or alternative), microhomology-mediated end joining (MMEJ), homology-directed repair (e.g., endogenous donor template mediated), SDSA (synthesis dependent strand annealing), single strand annealing or single strand invasion. Alteration of the CXCR4 gene, e.g., mediated by NHEJ, can result in a mutation, which typically comprises a deletion or insertion (indel). The introduced mutation can take place in any region of the CXCR4 gene, e.g., a promoter region or other non-coding region, or a coding region, so long as the mutation results in reduced or loss of the ability to mediate HIV entry into the cell.

[2300] In another aspect, the methods and compositions discussed herein may be used to alter the CXCR4 gene to treat or prevent HIV infection or AIDS by targeting the coding sequence of the CXCR4 gene.

[2301] In an embodiment, the gene, e.g., the coding sequence of the CXCR4 gene, is targeted to knock out the gene, e.g., to eliminate expression of the gene, e.g., to knock out both alleles of the CXCR4 gene, e.g., by introduction of an alteration comprising a mutation (e.g., an insertion or deletion) in the CXCR4 gene. This type of alteration is sometimes referred to as “knocking out” the CXCR4 gene. While not wishing to be bound by theory, in an embodiment, a targeted knockout approach is mediated by NHEJ using a CRISPR/Cas system comprising a Cas9 molecule, e.g., an enzymatically active Cas9 (eaCas9) molecule, as described herein.

[2302] In another aspect, the methods and compositions discussed herein may be used to alter the CXCR4 gene to treat or prevent HIV infection or AIDS by targeting a non-coding sequence of the CXCR4 gene, e.g., a promoter, an enhancer, an intron, a 3′UTR, and/or a polyadenylation signal.

[2303] In one embodiment, the gene, e.g., the non-coding sequence of the CXCR4 gene, is targeted to knock out the gene, e.g., to eliminate expression of the gene, e.g., to knock out both alleles of the CXCR4 gene, e.g., by introduction of an alteration comprising a mutation (e.g., an insertion or deletion) in the CXCR4 gene. In an embodiment, the method provides an alteration that comprises an insertion or deletion. This type of alteration is also sometimes referred to as “knocking out” the CXCR4 gene. While not wishing to be bound by theory, in an embodiment, a targeted knockout approach is mediated by NHEJ using a CRISPR/Cas system comprising a Cas9 molecule, e.g., an enzymatically active Cas9 (eaCas9) molecule, as described herein.

[2304] In an embodiment, methods and compositions discussed herein, provide for altering (e.g., knocking out) the CXCR4 gene. In an embodiment, knocking out the CXCR4 gene herein refers to (1) insertion or deletion (e.g., NHEJ-mediated insertion or deletion) of one or more nucleotides of the CXCR4 gene (e.g., in close proximity to or within an early coding region or in a non-coding region), or (2) deletion (e.g., NHEJ-mediated deletion) of a genomic sequence of the CXCR4 gene (e.g., in a coding region or in a non-coding region). Both approaches can give rise to alteration (e.g., knockout) of the CXCR4 gene as described herein. In an embodiment, a CXCR4 target knockout position is altered by genome editing using the CRISPR/Cas9 system. The CXCR4 target knockout position may be targeted by cleaving with either one or more nucleases, or one or more nickases, or a combination thereof.

[2305] “CXCR4 target knockout position”, as used herein, refers to a position in the CXCR4 gene, which if altered, e.g., disrupted by insertion or deletion of one or more nucleotides, e.g., by NHEJ-mediated alteration, results in alteration of the CXCR4 gene. In an embodiment, the position is in the CXCR4 coding region, e.g., an early coding region. In another embodiment, the position is in a non-coding sequence of the CXCR4 gene, e.g., a promoter, an enhancer, an intron, a 3′UTR, and/or a polyadenylation signal.

[2306] In another embodiment, the CXCR4 gene is targeted to knock down the gene, e.g., to reduce or eliminate expression of the gene, e.g., to knock down one or both alleles of the CXCR4 gene.

[2307] In one embodiment, the coding region of the CXCR4 gene, is targeted to alter the expression of the gene. In another embodiment, a non-coding region (e.g., an enhancer region, a promoter region, an intron, a 5′ UTR, a 3′UTR, or a polyadenylation signal) of the CXCR4 gene is targeted to alter the expression of the gene. In an embodiment, the promoter region of the CXCR4 gene is targeted to knock down the expression of the CXCR4 gene. This type of alteration is also sometimes referred to as “knocking down” the CXCR4 gene. While not wishing to be bound by theory, in an embodiment, a targeted knockdown approach is mediated by a CRISPR/Cas system comprising a Cas9 molecule, e.g., an enzymatically inactive Cas9 (eiCas9) molecule or an eiCas9 fusion protein (e.g., an eiCas9 fused to a transcription repressor domain or chromatin modifying protein), as described herein. In an embodiment, the CXCR4 gene is targeted to alter (e.g., to block, reduce, or decrease) the transcription of the CXCR4 gene. In another embodiment, the CXCR4 gene is targeted to alter the chromatin structure (e.g., one or more histone and/or DNA modifications) of the CXCR4 gene. In an embodiment, one or more gRNA molecules comprising a targeting domain are configured to target an enzymatically inactive Cas9 (eiCas9) molecule or an eiCas9 fusion protein (e.g., an eiCas9 fused to a transcription repressor domain), sufficiently close to a CXCR4 target knockdown position to reduce, decrease or repress expression of the CXCR4 gene.

[2308] “CXCR4 target knockdown position”, as used herein, refers to a position in the CXCR4 gene, which if targeted, e.g., by an eiCas9 molecule or an eiCas9 fusion described herein, results in reduction or elimination of expression of functional CXCR4 gene product. In an embodiment, the transcription of the CXCR4 gene is reduced or eliminated. In another embodiment, the chromatin structure of the CXCR4 gene is altered. In an embodiment, the position is in the CXCR4 promoter sequence. In an embodiment, a position in the promoter sequence of the CXCR4 gene is targeted by an enzymatically inactive Cas9 (eiCas9) molecule or an eiCas9 fusion protein, as described herein.

[2309] “CXCR4 target position”, as used herein, refers to any position that results in inactivation of the CXCR4 gene. In an embodiment, a CXCR4 target position refers to any of a CXCR4 target knockout position or a CXCR4 target knockdown position, as described herein.

[2310] In one aspect, disclosed herein is a gRNA molecule, e.g., an isolated or non-naturally occurring gRNA molecule, comprising a targeting domain which is complementary with a target domain from the CXCR4 gene.

[2311] In an embodiment, the targeting domain of the gRNA molecule is configured to provide a cleavage event, e.g., a double strand break or a single strand break, sufficiently close to a CXCR4 target position in the CXCR4 gene to allow alteration, e.g., alteration associated with NHEJ, of a CXCR4 target position in the CXCR4 gene. In an embodiment, the alteration comprises an insertion or deletion. In an embodiment, the targeting domain is configured such that a cleavage event, e.g., a double strand or single strand break, is positioned within 1, 2, 3, 4, 5, 10, 15, 20, 25, 30, 35, 40, 45, 50, 60, 70, 80, 90, 100, 150, 200, 300, 400, 450, or 500 nucleotides of a CXCR4 target position. The break, e.g., a double strand or single strand break, can be positioned upstream or downstream of a CXCR4 target position in the CXCR4 gene.

[2312] In an embodiment, a second gRNA molecule comprising a second targeting domain is configured to provide a cleavage event, e.g., a double strand break or a single strand break, sufficiently close to the CXCR4 target position in the CXCR4 gene, to allow alteration, e.g., alteration associated with NHEJ, of the CXCR4 target position in the CXCR4 gene, either alone or in combination with the break positioned by said first gRNA molecule. In an embodiment, the targeting domains of the first and second gRNA molecules are configured such that a cleavage event, e.g., a double strand or single strand break, is positioned, independently for each of the gRNA molecules, within 1, 2, 3, 4, 5, 10, 15, 20, 25, 30, 35, 40, 45, 50, 60, 70, 80, 90, 100, 150, 200, 300, 400, 450, or 500 nucleotides of the target position. In an embodiment, the breaks, e.g., double strand or single strand breaks, are positioned on both sides of a nucleotide of a CXCR4 target position in the CXCR4 gene. In an embodiment, the breaks, e.g., double strand or single strand breaks, are positioned on one side, e.g., upstream or downstream, of a nucleotide of a CXCR4 target position in the CXCR4 gene.

[2313] In an embodiment, a single strand break is accompanied by an additional single strand break, positioned by a second gRNA molecule, as discussed below. For example, the targeting domains are configured such that a cleavage event, e.g., the two single strand breaks, are positioned within 1, 2, 3, 4, 5, 10, 15, 20, 25, 30, 35, 40, 45, 50, 60, 70, 80, 90, 100, 150, 200, 300, 400, 450, or 500 nucleotides of a CXCR4 target position. In an embodiment, the first and second gRNA molecules are configured such, that when guiding a Cas9 molecule, e.g., a Cas9 nickase, a single strand break will be accompanied by an additional single strand break, positioned by a second gRNA, sufficiently close to one another to result in alteration of a CXCR4 target position in the CXCR4 gene. In an embodiment, the first and second gRNA molecules are configured such that a single strand break positioned by said second gRNA is within 1, 2, 3, 4, 5, 10, 20, 30, 40, 50, 60, 70, 80, 90, 100, 200, 300, 400, 500, 600, 700, 800, 900, or 1000 nucleotides of the break positioned by said first gRNA molecule, e.g., when the Cas9 molecule is a nickase. In an embodiment, the two gRNA molecules are configured to position cuts at the same position, or within a few nucleotides of one another, on different strands, e.g., essentially mimicking a double strand break.

[2314] In an embodiment, a double strand break can be accompanied by an additional double strand break, positioned by a second gRNA molecule, as is discussed below. For example, the targeting domain of a first gRNA molecule is configured such that a double strand break is positioned upstream of a CXCR4 target position in the CXCR4 gene, e.g., within 1, 2, 3, 4, 5, 10, 15, 20, 25, 30, 35, 40, 45, 50, 60, 70, 80, 90, 100, 150, 200, 300, 400, 450, or 500 nucleotides of the target position; and the targeting domain of a second gRNA molecule is configured such that a double strand break is positioned downstream of a CXCR4 target position in the CXCR4 gene, e.g., within 1, 2, 3, 4, 5, 10, 15, 20, 25, 30, 35, 40, 45, 50, 60, 70, 80, 90, 100, 150, 200, 300, 400, 450, or 500 nucleotides of the target position. In an embodiment, the first and second gRNA molecules are configured such that a double strand break positioned by said second gRNA is within 10, 20, 30, 40, 50, 60, 70, 80, 90, 100, 200, 300, 400, 500, 600, 700, 800, 900, or 1000 nucleotides of the break positioned by said first gRNA molecule.

[2315] In an embodiment, the targeting domains of the first and second gRNA molecules are configured such that a cleavage event, e.g., a single strand break, is positioned, independently for each of the gRNA molecules.

[2316] In an embodiment, a double strand break can be accompanied by two additional single strand breaks, positioned by a second gRNA molecule and a third gRNA molecule. For example, the targeting domain of a first gRNA molecule is configured such that a double strand break is positioned upstream of a CXCR4 target position in the CXCR4 gene, e.g., within 1, 2, 3, 4, 5, 10, 15, 20, 25, 30, 35, 40, 45, 50, 60, 70, 80, 90, 100, 150, 200, 300, 400, 450, or 500 nucleotides of the target position; and the targeting domains of a second and third gRNA molecule are configured such that two single strand breaks are positioned downstream of a CXCR4 target position in the CXCR4 gene, e.g., within 1, 2, 3, 4, 5, 10, 15, 20, 25, 30, 35, 40, 45, 50, 60, 70, 80, 90, 100, 150, 200, 300, 400, 450, or 500 nucleotides of the target position. In an embodiment, the first, second and third gRNA molecules are configured such that a single strand break positioned by said second or third gRNA molecule is within 10, 20, 30, 40, 50, 60, 70, 80, 90, 100, 200, 300, 400, 500, 600, 700, 800, 900, or 1000 nucleotides of the break positioned by said first gRNA molecule. In an embodiment, the targeting domains of the first, second and third gRNA molecules are configured such that a cleavage event, e.g., a double strand or single strand break, is positioned, independently for each of the gRNA molecules.

[2317] In an embodiment, when CXCR4 is targeted for knock out, a first and second single strand breaks can be accompanied by two additional single strand breaks positioned by a third gRNA molecule and a fourth gRNA molecule. For example, the targeting domain of a first and second gRNA molecule are configured such that two single strand breaks are positioned upstream of a CXCR4 target position in the CXCR4 gene, e.g., within 1, 2, 3, 4, 5, 10, 15, 20, 25, 30, 35, 40, 45, 50, 60, 70, 80, 90, 100, 150, 200, 300, 400, 450, or 500 nucleotides of the target position; and the targeting domains of a third and fourth gRNA molecule are configured such that two single strand breaks are positioned downstream of a CXCR4 target position in the CXCR4 gene, e.g., within 1, 2, 3, 4, 5, 10, 15, 20, 25, 30, 35, 40, 45, 50, 60, 70, 80, 90, 100, 150, 200, 300, 400, 450, or 500 nucleotides of the target position. In an embodiment, the first, second, third and fourth gRNA molecules are configured such that the single strand break positioned by said third or fourth gRNA molecule is within 10, 20, 30, 40, 50, 60, 70, 80, 90, 100, 200, 300, 400, 500, 600, 700, 800, 900, or 1000 nucleotides of the break positioned by said first or second gRNA molecule, e.g., when the Cas9 molecule is a nickase. In an embodiment, the targeting domains of the first, second, third and fourth gRNA molecules are configured such that a cleavage event, e.g., a single strand break, is positioned, independently for each of the gRNA molecules.

[2318] It is contemplated herein that, in an embodiment, when multiple gRNAs are used to generate (1) two single stranded breaks in close proximity, (2) two double stranded breaks, e.g., flanking a CXCR4 target position (e.g., to remove a piece of DNA, e.g., a insertion or deletion mutation) or to create more than one indel in an early coding region, (3) one double stranded break and two paired nicks flanking a CXCR4 target position (e.g., to remove a piece of DNA, e.g., a insertion or deletion mutation) or (4) four single stranded breaks, two on each side of a CXCR4 target position, that they are targeting the same CXCR4 target position. It is further contemplated herein that in an embodiment multiple gRNAs may be used to target more than one target position in the same gene.

[2319] In an embodiment, the targeting domain of the first gRNA molecule and the targeting domain of the second gRNA molecules are complementary to opposite strands of the target nucleic acid molecule. In an embodiment, the gRNA molecule and the second gRNA molecule are configured such that the PAMs are oriented outward.

[2320] In an embodiment, the targeting domain of a gRNA molecule is configured to avoid unwanted target chromosome elements, such as repeat elements, e.g., Alu repeats, in the target domain. The gRNA molecule may be a first, second, third and/or fourth gRNA molecule, as described herein.

[2321] In an embodiment, the targeting domain of a gRNA molecule is configured to position a cleavage event sufficiently far from a preselected nucleotide, e.g., the nucleotide of a coding region, such that the nucleotide is not altered. In an embodiment, the targeting domain of a gRNA molecule is configured to position an intronic cleavage event sufficiently far from an intron/exon border, or naturally occurring splice signal, to avoid alteration of the exonic sequence or unwanted splicing events. The gRNA molecule may be a first, second, third and/or fourth gRNA molecule, as described herein.

[2322] In an embodiment, the targeting domain which is complementary with a target domain from the CXCR4 target position in the CXCR4 gene is 16 nucleotides or more in length. In an embodiment, the targeting domain is 16 nucleotides in length. In an embodiment, the targeting domain is 17 nucleotides in length. In other embodiments, the targeting domain is 18 nucleotides in length. In still other embodiments, the targeting domain is 19 nucleotides in length. In still other embodiments, the targeting domain is 20 nucleotides in length. In an embodiment, the targeting domain is 21 nucleotides in length. In an embodiment, the targeting domain is 22 nucleotides in length. In an embodiment, the targeting domain is 23 nucleotides in length. In an embodiment, the targeting domain is 24 nucleotides in length. In an embodiment, the targeting domain is 25 nucleotides in length. In an embodiment, the targeting domain is 26 nucleotides in length.

[2323] In an embodiment, the targeting domain comprises 16 nucleotides.

[2324] In an embodiment, the targeting domain comprises 17 nucleotides.

[2325] In an embodiment, the targeting domain comprises 18 nucleotides.

[2326] In an embodiment, the targeting domain comprises 19 nucleotides.

[2327] In an embodiment, the targeting domain comprises 20 nucleotides.

[2328] In an embodiment, the targeting domain comprises 21 nucleotides.

[2329] In an embodiment, the targeting domain comprises 22 nucleotides.

[2330] In an embodiment, the targeting domain comprises 23 nucleotides.

[2331] In an embodiment, the targeting domain comprises 24 nucleotides.

[2332] In an embodiment, the targeting domain comprises 25 nucleotides.

[2333] In an embodiment, the targeting domain comprises 26 nucleotides.

[2334] A gRNA as described herein may comprise from 5′ to 3′: a targeting domain (comprising a “core domain”, and optionally a “secondary domain”); a first complementarity domain; a linking domain; a second complementarity domain; a proximal domain; and a tail domain. In some embodiments, the proximal domain and tail domain are taken together as a single domain.

[2335] In an embodiment, a gRNA comprises a linking domain of no more than 25 nucleotides in length; a proximal and tail domain, that taken together, are at least 20 nucleotides in length; and a targeting domain equal to or greater than 16, 17, 18, 19, 20, 21, 22, 23, 24, 25 or 26 nucleotides in length.

[2336] In another embodiment, a gRNA comprises a linking domain of no more than 25 nucleotides in length; a proximal and tail domain, that taken together, are at least 25 nucleotides in length; and a targeting domain equal to or greater than 16, 17, 18, 19, 20, 21, 22, 23, 24, 25 or 26 nucleotides in length.

[2337] In another embodiment, a gRNA comprises a linking domain of no more than 25 nucleotides in length; a proximal and tail domain, that taken together, are at least 30 nucleotides in length; and a targeting domain equal to or greater than 16, 17, 18, 19, 20, 21, 22, 23, 24, 25 or 26 nucleotides in length.

[2338] In another embodiment, a gRNA comprises a linking domain of no more than 25 nucleotides in length; a proximal and tail domain, that taken together, are at least 40 nucleotides in length; and a targeting domain equal to or greater than 16, 17, 18, 19, 20, 21, 22, 23, 24, 25 or 26 nucleotides in length.

[2339] A cleavage event, e.g., a double strand or single strand break, is generated by a Cas9 molecule. The Cas9 molecule may be an enzymatically active Cas9 (eaCas9) molecule, e.g., an eaCas9 molecule that forms a double strand break in a target nucleic acid or an eaCas9 molecule forms a single strand break in a target nucleic acid (e.g., a nickase molecule).

[2340] In an embodiment, the eaCas9 molecule catalyzes a double strand break.

[2341] In some embodiments, the eaCas9 molecule comprises HNH-like domain cleavage activity but has no, or no significant, N-terminal RuvC-like domain cleavage activity. In this case, the eaCas9 molecule is an HNH-like domain nickase, e.g., the eaCas9 molecule comprises a mutation at D10, e.g., D10A. In other embodiments, the eaCas9 molecule comprises N-terminal RuvC-like domain cleavage activity but has no, or no significant, HNH-like domain cleavage activity. In an embodiment, the eaCas9 molecule is an N-terminal RuvC-like domain nickase, e.g., the eaCas9 molecule comprises a mutation at H840, e.g., H840A. In an embodiment, the eaCas9 molecule is an N-terminal RuvC-like domain nickase, e.g., the eaCas9 molecule comprises a mutation at N863, e.g., N863A.

[2342] In an embodiment, a single strand break is formed in the strand of the target nucleic acid to which the targeting domain of said gRNA is complementary. In another embodiment, a single strand break is formed in the strand of the target nucleic acid other than the strand to which the targeting domain of said gRNA is complementary.

[2343] In another aspect, disclosed herein is a nucleic acid, e.g., an isolated or non-naturally occurring nucleic acid, e.g., DNA, that comprises (a) a sequence that encodes a gRNA molecule comprising a targeting domain that is complementary with a CXCR4 target position in the CXCR4 gene as disclosed herein.

[2344] In an embodiment, the nucleic acid encodes a gRNA molecule, e.g., a first gRNA molecule, comprising a targeting domain configured to provide a cleavage event, e.g., a double strand break or a single strand break, sufficiently close to a CXCR4 target position in the CXCR4 gene to allow alteration, e.g., alteration associated with NHEJ, of a CXCR4 target position in the CXCR4 gene.

[2345] In an embodiment, the nucleic acid encodes a gRNA molecule, e.g., a first gRNA molecule, comprising a targeting domain configured to target an enzymatically inactive Cas9 (eiCas9) molecule or an eiCas9 fustion protein (e.g., an eiCas9 fused to a transcription repressor domain or chromatin modifying protein), sufficiently close to a CXCR4 knockdown target position to reduce, decrease or repress expression of the CXCR4 gene.

[2346] The Cas9 molecule may be a nickase molecule, an enzymatically active Cas9 (eaCas9) molecule, e.g., an eaCas9 molecule that forms a double strand break in a target nucleic acid and/or an eaCas9 molecule that forms a single strand break in a target nucleic acid. In an embodiment, a single strand break is formed in the strand of the target nucleic acid to which the targeting domain of said gRNA is complementary. In another embodiment, a single strand break is formed in the strand of the target nucleic acid other than the strand to which to which the targeting domain of said gRNA is complementary.

[2347] In an embodiment, the eaCas9 molecule catalyzes a double strand break.

[2348] In an embodiment, the eaCas9 molecule comprises HNH-like domain cleavage activity but has no, or no significant, N-terminal RuvC-like domain cleavage activity. In another embodiment, the said eaCas9 molecule is an HNH-like domain nickase, e.g., the eaCas9 molecule comprises a mutation at D10, e.g., D10A. In another embodiment, the eaCas9 molecule comprises N-terminal RuvC-like domain cleavage activity but has no, or no significant, HNH-like domain cleavage activity. In another embodiment, the eaCas9 molecule is an N-terminal RuvC-like domain nickase, e.g., the eaCas9 molecule comprises a mutation at H840, e.g., H840A. In another embodiment, the eaCas9 molecule is an N-terminal RuvC-like domain nickase, e.g., the eaCas9 molecule comprises a mutation at N863, e.g., N863A.

[2349] In an embodiment, the Cas9 molecule is an enzymatically active Cas9 (eaCas9) molecule. In an embodiment, the Cas9 molecule is an enzymatically inactive Cas9 (eiCas9) molecule or a modified eiCas9 molecule, e.g., the eiCas9 molecule is fused to Kruppel-associated box (KRAB) to generate an eiCas9-KRAB fusion protein molecule.

[2350] In an embodiment, a nucleic acid encodes a sequence that encodes a Cas9 molecule, e.g., a Cas9 molecule described herein. In an embodiment, a nucleic acid that encodes a Cas9 molecule is present on a nucleic acid molecule, e.g., a vector, e.g., a viral vector, e.g., an adeno-associated virus (AAV) vector. In an embodiment, the nucleic acid molecule is an AAV vector. Exemplary AAV vectors that may be used in any of the described compositions and methods include an AAV1 vector, a modified AAV1 vector, an AAV2 vector, a modified AAV2 vector, an AAV3 vector, an AAV4 vector, a modified AAV4 vector, an AAV5 vector, a modified AAV5 vector, a modified AAV3 vector, an AAV6 vector, a modified AAV6 vector, an AAV8 vector an AAV9 vector, an AAV.rh10 vector, a modified AAV.rh10 vector, an AAV.rh32/33 vector, a modified AAV.rh32/33 vector, an AAV.rh43 vector, a modified AAV.rh43 vector, an AAV.rh64R1 vector, and a modified AAV.rh64R1 vector.

[2351] In another aspect, disclosed herein is a composition comprising (e) a gRNA molecule comprising a targeting domain that is complementary with a target domain in the CXCR4 gene, as described herein. The composition of (e) may further comprise (f) a Cas9 molecule, e.g., a Cas9 molecule as described herein. A composition of (e) and (f) may further comprise (g) a second, third and/or fourth gRNA molecule, e.g., a second, third and/or fourth gRNA molecule described herein. In an embodiment, the composition is a pharmaceutical composition. The compositions described herein, e.g., pharmaceutical compositions described herein, can be used in the treatment or prevention of HIV or AIDS in a subject, e.g., in accordance with a method disclosed herein.

[2352] In another aspect, disclosed herein is a method of altering a cell, e.g., altering the structure, e.g., altering the sequence, of a target nucleic acid of a cell, comprising contacting said cell with: (e) a gRNA that targets the CXCR4 gene, e.g., a gRNA as described herein; (f) a Cas9 molecule, e.g., a Cas9 molecule as described herein; and optionally, (g) a second, third and/or fourth gRNA that targets CXCR4 gene, e.g., a second, third and/or fourth gRNA as described herein.

[2353] In an embodiment, the method comprises contacting said cell with (e) and (f).

[2354] In an embodiment, the method comprises contacting said cell with (e), (f), and (g).

[2355] In an embodiment, the method comprises contacting a cell from a subject suffering from or likely to develop an HIV infection or AIDS. The cell may be from a subject who does not have a mutation at a CXCR4 target position.

[2356] In an embodiment, the cell being contacted in the disclosed method is a target cell from a circulating blood cell, a progenitor cell, or a stem cell, e.g., a hematopoietic stem cell (HSC) or a hematopoietic stem/progenitor cell (HSPC). In an embodiment, the target cell is a T cell (e.g., a CD4+ T cell, a CD8+ T cell, a helper T cell, a regulatory T cell, a cytotoxic T cell, a memory T cell, a T cell precursor or a natural killer T cell), a B cell (e.g., a progenitor B cell, a Pre B cell, a Pro B cell, a memory B cell, a plasma B cell), a monocyte, a megakaryocyte, a neutrophil, an eosinophil, a basophil, a mast cell, a reticulocyte, a lymphoid progenitor cell, a myeloid progenitor cell, or a hematopoietic stem cell. In an embodiment, the target cell is a bone marrow cell, (e.g., a lymphoid progenitor cell, a myeloid progenitor cell, an erythroid progenitor cell, a hematopoietic stem cell, or a mesenchymal stem cell). In an embodiment, the cell is a CD4 cell, a T cell, a gut associated lymphatic tissue (GALT), a macrophage, a dendritic cell, a myeloid precursor cell, or a microglia. The contacting may be performed ex vivo and the contacted cell may be returned to the subject's body after the contacting step.

[2357] In an embodiment, the method of altering a cell as described herein comprises acquiring knowledge of the presence of a CXCR4 target position in said cell, prior to the contacting step. Acquiring knowledge of the presence of a CXCR4 target position in the cell may be by sequencing the CXCR4 gene, or a portion of the CXCR4 gene.

[2358] In an embodiment, the contacting step comprises contacting the cell with a nucleic acid, e.g., a vector, e.g., an AAV vector, e.g., an AAV1 vector, a modified AAV1 vector, an AAV2 vector, a modified AAV2 vector, an AAV3 vector, a modified AAV3 vector, an AAV4 vector, a modified AAV4 vector, an AAV5 vector, a modified AAV5 vector, an AAV6 vector, a modified AAV6 vector, an AAV7 vector, a modified AAV7 vector, an AAV8 vector, an AAV9 vector, an AAV.rh10 vector, a modified AAV.rh10 vector, an AAV.rh32/33 vector, a modified AAV.rh32/33 vector, an AAV.rh43vector, a modified AAV.rh43vector, an AAV.rh64R1vector, and a modified AAV.rh64R1vector.adescribed herein.

[2359] In an embodiment, the contacting step further comprises contacting the cell with an HSC self-renewal agonist, e.g., UM171 ((1r,4r)-N1-(2-benzyl-7-(2-methyl-2H-tetrazol-5-yl)-9H-pyrimido[4,5-b]indol-4-yl)cyclohexane-1,4-diamine) or a pyrimidoindole derivative described in Fares et al., Science, 2014, 345(6203): 1509-1512). In an embodiment, the cell is contacted with the HSC self-renewal agonist before (e.g., at least 1, 2, 4, 8, 12, 24, 36, or 48 hours before, e.g., about 2 hours before) the cell is contacted with a gRNA molecule and/or a Cas9 molecule. In another embodiment, the cell is contacted with the HSC self-renewal agonist after (e.g., at least 1, 2, 4, 8, 12, 24, 36, or 48 hours after, e.g., about 24 hours after) the cell is contacted with a gRNA molecule and/or a Cas9 molecule. In yet another embodiment, the cell is contacted with the HSC self-renewal agonist before (e.g., at least 1, 2, 4, 8, 12, 24, 36, or 48 hours before) and after (e.g., at least 1, 2, 4, 8, 12, 24, 36, or 48 hours after) the cell is contacted with a gRNA molecule and/or a Cas9 molecule. In an embodiment, the cell is contacted with the HSC self-renewal agonist about 2 hours before and about 24 hours after the cell is contacted with a gRNA molecule and/or a Cas9 molecule. In an embodiment, the cell is contacted with the HSC self-renewal agonist at the same time the cell is contacted with a gRNA molecule and/or a Cas9 molecule. In an embodiment, the HSC self-renewal agonist, e.g., UM171, is used at a concentration between 5 and 200 nM, e.g., between 10 and 100 nM or between 20 and 50 nM, e.g., about 40 nM.

[2360] In another aspect, disclosed herein is a cell or a population of cells produced (e.g., altered) by a method described herein.

[2361] In another aspect, disclosed herein is a method of treating a subject suffering from or likely to develop an HIV infection or AIDS, e.g., altering the structure, e.g., sequence, of a target nucleic acid of the subject, comprising contacting a cell from the subject with:

[2362] (e) a gRNA that targets the CXCR4 gene, e.g., a gRNA disclosed herein;

[2363] (f) a Cas9 molecule, e.g., a Cas9 molecule disclosed herein; and

[2364] optionally, (g)(i) a second gRNA that targets the CXCR4 gene, e.g., a second gRNA disclosed herein, and

[2365] further optionally, (g)(ii) a third gRNA, and still further optionally, (g)(iii) a fourth gRNA that target the CXCR4 gene, e.g., a third and fourth gRNA disclosed herein.

[2366] In some embodiments, contacting comprises contacting with (e) and (f).

[2367] In some embodiments, contacting comprises contacting with (e), (f), and (g)(i). In some embodiments, contacting comprises contacting with (e), (f), and (g) (i) and (g)(ii). In some embodiments, contacting comprises contacting with (e), (f), and (g)(i), (g)(ii) and (g)(iii).

[2368] In an embodiment, the method comprises acquiring knowledge of the presence or absence of a mutation at a CXCR4 target position in said subject.

[2369] In an embodiment, the method comprises acquiring knowledge of the presence or absence of a mutation at a CXCR4 target position in said subject by sequencing the CXCR4 gene or a portion of the CXCR4 gene.

[2370] In an embodiment, the method comprises introducing a mutation at a CXCR4 target position.

[2371] In an embodiment, the method comprises introducing a mutation at a CXCR4 target position by NHEJ.

[2372] When the method comprises introducing a mutation at a CXCR4 target position, e.g., by NHEJ in the coding region or a non-coding region, a Cas9 of (f) and at least one guide RNA (e.g., a guide RNA of (e)) are included in the contacting step.

[2373] In an embodiment, a cell of the subject is contacted ex vivo with (e), (f) and optionally (g)(i), further optionally (g)(ii), and still further optionally (g)(iii). In an embodiment, said cell is returned to the subject's body.

[2374] In another aspect, disclosed herein is a reaction mixture comprising a gRNA molecule, a nucleic acid, or a composition described herein, and a cell, e.g., a cell from a subject having, or likely to develop and HIV infection or AIDS, or a subject having a mutation at a CXCR4 target position (e.g., a heterozygous carrier of a CXCR4 mutation).

[2375] In another aspect, disclosed herein is a kit comprising, (e) a gRNA molecule described herein, or a nucleic acid that encodes the gRNA, and one or more of the following:

[2376] (f) a Cas9 molecule, e.g., a Cas9 molecule described herein, or a nucleic acid or mRNA that encodes the Cas9;

[2377] (g)(i) a second gRNA molecule, e.g., a second gRNA molecule described herein or a nucleic acid that encodes (g)(i);

[2378] (g)(ii) a third gRNA molecule, e.g., a third gRNA molecule described herein or a nucleic acid that encodes (g)(ii);

[2379] (g)(iii) a fourth gRNA molecule, e.g., a fourth gRNA molecule described herein or a nucleic acid that encodes (g)(iii).

[2380] In an embodiment, the kit comprises a nucleic acid, e.g., an AAV vector, that encodes one or more of (e), (f), (g)(i), (g)(ii), and (g)(iii).

[2381] In yet another aspect, disclosed herein is a gRNA molecule, e.g., a gRNA molecule described herein, for use in treating, or delaying the onset or progression of, HIV infection or AIDS in a subject, e.g., in accordance with a method of treating, or delaying the onset or progression of, HIV infection or AIDS as described herein.

[2382] In an embodiment, the gRNA molecule in used in combination with a Cas9 molecule, e.g., a Cas9 molecule described herein. Additionally or alternatively, in an embodiment, the gRNA molecule is used in combination with a second, third and/or fourth gRNA molecule, e.g., a second, third and/or fourth gRNA molecule described herein.

[2383] In still another aspect, disclosed herein is use of a gRNA molecule, e.g., a gRNA molecule described herein, in the manufacture of a medicament for treating, or delaying the onset or progression of, HIV infection or AIDS in a subject, e.g., in accordance with a method of treating, or delaying the onset or progression of, HIV infection or AIDS as described herein.

[2384] In an embodiment, by multiplexing the alteration of both CCR5 and CXCR4, entry of the HIV virus into the host cells is reduced or prevented. Examplary multiplexing alterations of CCR5 and CXCR4 gene are: introducing one or more mutations in the gene for C-C chemokine receptor type 5 (CCR5), e.g., by introducing a protective mutation (such as a CCR5 delta 32 mutation), and knocking out the CXCR4 gene, introducing one or more mutations in the gene for C-C chemokine receptor type 5 (CCR5), e.g., by introducing a protective mutation (such as a CCR5 delta 32 mutation), and knocking down the CXCR4 gene, knocking out both CCR5 and CXCR4 genes, knocking down both CCR5 and CXCR4 genes, knocking out the CCR5 gene and knocking down the CXCR4 gene, or knocking down the CCR5 gene and knocking out the CXCR4 gene.

[2385] In an embodiment, the medicament comprises a Cas9 molecule, e.g., a Cas9 molecule described herein. Additionally or alternatively, in an embodiment, the medicament comprises a second, third and/or fourth gRNA molecule, e.g., a second, third and/or fourth gRNA molecule described herein.

[2386] Methods of Targeting CXCR4

[2387] As disclosed herein, the CXCR4 gene can be targeted (e.g., altered) by gene editing, e.g., using CRISPR-Cas9 mediated methods as described herein.

[2388] Methods and compositions discussed herein, provide for targeting (e.g., altering) a CXCR4 target position in the CXCR4 gene. A CXCR4 target position can be targeted (e.g., altered) by gene editing, e.g., using CRISPR-Cas9 mediated methods to target (e.g. alter) the CXCR4 gene.

[2389] Disclosed herein are methods for targeting (e.g., altering) a CXCR4 target position in the CXCR4 gene. Targeting (e.g., altering) the CXCR4 target position is achieved, e.g., by:

[2390] (3) knocking out the CXCR4 gene:
[2391] (3a) insertion or deletion (e.g., NHEJ-mediated insertion or deletion) of one or more nucleotides in close proximity to or within the early coding region of the CXCR4 gene, or
[2392] (3b) deletion (e.g., NHEJ-mediated deletion) of a genomic sequence including at least a portion of the CXCR4 gene, or

[2393] (4) knocking down the CXCR4 gene mediated by enzymatically inactive Cas9 (eiCas9) molecule or an eiCas9-fusion protein by targeting non-coding region, e.g., a promoter region, of the gene.

[2394] Methods below all give rise to targeting (e.g., alteration) of the CXCR4 gene.

[2395] In one embodiment, methods described herein introduce one or more breaks near the early coding region in at least one allele of the CXCR4 gene. In another embodiment, methods described herein introduce two or more breaks to flank at least a portion of the CXCR4 gene. The two or more breaks remove (e.g., delete) a genomic sequence including at least a portion of the CXCR4 gene. In another embodiment, methods described herein comprise knocking down the CXCR4 gene mediated by enzymatically inactive Cas9 (eiCas9) molecule or an eiCas9-fusion protein by targeting the promoter region of CXCR4 target knockdown position. Methods 3a, 3b and 4 described herein result in targeting (e.g., alteration) of the CXCR4 gene.

[2396] The targeting (e.g., alteration) of the CXCR4 gene can be mediated by any mechanism. Exemplary mechanisms that can be associated with the alteration of the CXCR4 gene include, but are not limited to, non-homologous end joining (e.g., classical or alternative), microhomology-mediated end joining (MMEJ), homology-directed repair (e.g., endogenous donor template mediated), SDSA (synthesis dependent strand annealing), single strand annealing or single strand invasion.

[2397] Knocking out CXCR4 by Introducing an Indel in the CXCR4 Gene

[2398] In an embodiment, the method comprises introducing an insertion of one more nucleotides in close proximity to the CXCR4 target knockout position (e.g., the early coding region) of the CXCR4 gene. As described herein, in one embodiment, the method comprises the introduction of one or more breaks (e.g., single strand breaks or double strand breaks) sufficiently close to (e.g., either 5′ or 3′ to) the early coding region of the CXCR4 target knockout position, such that the break-induced indel could be reasonably expected to span the CXCR4 target knockout position (e.g., the early coding region). While not wishing to be bound by theory, it is believed that NHEJ-mediated repair of the break(s) allows for the NHEJ-mediated introduction of an indel in close proximity to within the early coding region of the CXCR4 target knockout position.

[2399] In an embodiment, the method comprises introducing a deletion of a genomic sequence comprising at least a portion of the CXCR4 gene. As described herein, in an embodiment, the method comprises the introduction of two double stand breaks—one 5′ and the other 3′ to (i.e., flanking) the CXCR4 target position. In an embodiment, two gRNAs, e.g., unimolecular (or chimeric) or modular gRNA molecules, are configured to position the two double strand breaks on opposite sides of the CXCR4 target knockout position in the CXCR4 gene.

[2400] In an embodiment, a single strand break is introduced (e.g., positioned by one gRNA molecule) at or in close proximity to a CXCR4 target position in the CXCR4 gene. In an embodiment, a single gRNA molecule (e.g., with a Cas9 nickase) is used to create a single strand break at or in close proximity to the CXCR4 target position, e.g., the gRNA is configured such that the single strand break is positioned either upstream (e.g., within 500 bp upstream, e.g., within 200 bp upstream) or downstream (e.g., within 500 bp downstream, e.g., within 200 bp downstream) of the CXCR4 target position. In an embodiment, the break is positioned to avoid unwanted target chromosome elements, such as repeat elements, e.g., an Alu repeat.

[2401] In an embodiment, a double strand break is introduced (e.g., positioned by one gRNA molecule) at or in close proximity to a CXCR4 target position in the CXCR4 gene. In an embodiment, a single gRNA molecule (e.g., with a Cas9 nuclease other than a Cas9 nickase) is used to create a double strand break at or in close proximity to the CXCR4 target position, e.g., the gRNA molecule is configured such that the double strand break is positioned either upstream (e.g., within 500 bp upstream, e.g., within 200 bp upstream) or downstream of (e.g., within 500 bp downstream, e.g., within 200 bp downstream) of a CXCR4 target position. In an embodiment, the break is positioned to avoid unwanted target chromosome elements, such as repeat elements, e.g., an Alu repeat.

[2402] In an embodiment, two single strand breaks are introduced (e.g., positioned by two gRNA molecules) at or in close proximity to a CXCR4 target position in the CXCR4 gene. In an embodiment, two gRNA molecules (e.g., with one or two Cas9 nickcases) are used to create two single strand breaks at or in close proximity to the CXCR4 target position, e.g., the gRNAs molecules are configured such that both of the single strand breaks are positioned e.g., within 500 bp upstream, e.g., within 200 bp upstream) or downstream (e.g., within 500 bp downstream, e.g., within 200 bp downstream) of the CXCR4 target position. In another embodiment, two gRNA molecules (e.g., with two Cas9 nickcases) are used to create two single strand breaks at or in close proximity to the CXCR4 target position, e.g., the gRNAs molecules are configured such that one single strand break is positioned upstream (e.g., within 200 bp upstream) and a second single strand break is positioned downstream (e.g., within 200 bp downstream) of the CXCR4 target position. In an embodiment, the breaks are positioned to avoid unwanted target chromosome elements, such as repeat elements, e.g., an Alu repeat.

[2403] In an embodiment, two double strand breaks are introduced (e.g., positioned by two gRNA molecules) at or in close proximity to a CXCR4 target position in the CXCR4 gene. In an embodiment, two gRNA molecules (e.g., with one or two Cas9 nucleases that are not Cas9 nickases) are used to create two double strand breaks to flank a CXCR4 target position, e.g., the gRNA molecules are configured such that one double strand break is positioned upstream (e.g., within500 bp upstream, e.g., within 200 bp upstream) and a second double strand break is positioned downstream (e.g., within 500 bp downstream, e.g., within 200 bp downstream) of the CXCR4 target position. In an embodiment, the breaks are positioned to avoid unwanted target chromosome elements, such as repeat elements, e.g., an Alu repeat.

[2404] In an embodiment, one double strand break and two single strand breaks are introduced (e.g., positioned by three gRNA molecules) at or in close proximity to a CXCR4 target position in the CXCR4 gene. In an embodiment, three gRNA molecules (e.g., with a Cas9 nuclease other than a Cas9 nickase and one or two Cas9 nickases) to create one double strand break and two single strand breaks to flank a CXCR4 target position, e.g., the gRNA molecules are configured such that the double strand break is positioned upstream or downstream of (e.g., within 500 bp, e.g., within 200 bp upstream or downstream) of the CXCR4 target position, and the two single strand breaks are positioned at the opposite site, e.g., downstream or upstream (e.g., within 500 bp, e.g., within 200 bp downstream or upstream), of the CXCR4 target position. In an embodiment, the breaks are positioned to avoid unwanted target chromosome elements, such as repeat elements, e.g., an Alu repeat.

[2405] In an embodiment, four single strand breaks are introduced (e.g., positioned by four gRNA molecules) at or in close proximity to a CXCR4 target position in the CXCR4 gene. In an embodiment, four gRNA molecule (e.g., with one or more Cas9 nickases are used to create four single strand breaks to flank a CXCR4 target position in the CXCR4 gene, e.g., the gRNA molecules are configured such that a first and second single strand breaks are positioned upstream (e.g., within500 bp upstream, e.g., within 200 bp upstream) of the CXCR4 target position, and a third and a fourth single stranded breaks are positioned downstream (e.g., within 500 bp downstream, e.g., within 200 bp downstream) of the CXCR4 target position. In an embodiment, the breaks are positioned to avoid unwanted target chromosome elements, such as repeat elements, e.g., an Alu repeat.

[2406] In an embodiment, two or more (e.g., three or four) gRNA molecules are used with one Cas9 molecule. In another embodiment, when two ore more (e.g., three or four) gRNAs are used with two or more Cas9 molecules, at least one Cas9 molecule is from a different species than the other Cas9 molecule(s). For example, when two gRNA molecules are used with two Cas9 molecules, one Cas9 molecule can be from one species and the other Cas9 molecule can be from a different species. Both Cas9 species are used to generate a single or double-strand break, as desired.

[2407] Knocking Out CXCR4 by Deleting a Genomic Sequence including at least a Portion of the CXCR4 Gene

[2408] In an embodiment, the method comprises deleting (e.g., NHEJ-mediated deletion) a genomic sequence including at least a portion of the CXCR4 gene. As described herein, in one embodiment, the method comprises the introduction two sets of breaks (e.g., a pair of double strand breaks, one double strand break or a pair of single strand breaks, or two pairs of single strand breaks) to flank a region of the CXCR4 gene (e.g., a coding region, e.g., an early coding region, or a non-coding region, e.g., a non-coding sequence of the CXCR4 gene, e.g., a promoter, an enhancer, an intron, a 3′UTR, and/or a polyadenylation signal). While not wishing to be bound by theory, it is believed that NHEJ-mediated repair of the break(s) allows for alteration of the CXCR4 gene as described herein, which reduces or eliminates expression of the gene, e.g., to knock out one or both alleles of the CXCR4 gene.

[2409] In an embodiment, two double strand breaks are introduced (e.g., positioned by two gRNA molecules) at or in close proximity to a CXCR4 target position in the CXCR4 gene. In an embodiment, two gRNA molecules (e.g., with one or two Cas9 nucleases that are not Cas9 nickases) are used to create two double strand breaks to flank a CXCR4 target position, e.g., the gRNA molecules are configured such that one double strand break is positioned upstream (e.g., within 500 bp upstream, e.g., within 200 bp upstream) and a second double strand break is positioned downstream (e.g., within 500 bp downstream, e.g., within 200 bp downstream) of the CXCR4 target position. In an embodiment, the breaks are positioned to avoid unwanted target chromosome elements, such as repeat elements, e.g., an Alu repeat.

[2410] In an embodiment, one double strand break and two single strand breaks are introduced (e.g., positioned by three gRNA molecules) at or in close proximity to a CXCR4 target position in the CXCR4 gene. In an embodiment, three gRNA molecules (e.g., with a Cas9 nuclease other than a Cas9 nickase and one or two Cas9 nickases) to create one double strand break and two single strand breaks to flank a CXCR4 target position, e.g., the gRNA molecules are configured such that the double strand break is positioned upstream or downstream of (e.g., within 500 bp, e.g., within 200 bp upstream or downstream) of the CXCR4 target position, and the two single strand breaks are positioned at the opposite site, e.g., downstream or upstream (e.g., within 500 bp, e.g., within 200 bp downstream or upstream), of the CXCR4 target position. In an embodiment, the breaks are positioned to avoid unwanted target chromosome elements, such as repeat elements, e.g., an Alu repeat.

[2411] In an embodiment, four single strand breaks are introduced (e.g., positioned by four gRNA molecules) at or in close proximity to a CXCR4 target position in the CXCR4 gene. In an embodiment, four gRNA molecule (e.g., with one or more Cas9 nickases are used to create four single strand breaks to flank a CXCR4 target position in the CXCR4 gene, e.g., the gRNA molecules are configured such that a first and second single strand breaks are positioned upstream (e.g., within500 bp upstream, e.g., within 200 bp upstream) of the CXCR4 target position, and a third and a fourth single stranded breaks are positioned downstream (e.g., within 500 bp downstream, e.g., within 200 bp downstream) of the CXCR4 target position. In an embodiment, the breaks are positioned to avoid unwanted target chromosome elements, such as repeat elements, e.g., an Alu repeat.

[2412] In an embodiment, two or more (e.g., three or four) gRNA molecules are used with one Cas9 molecule. In another embodiment, when two ore more (e.g., three or four) gRNAs are used with two or more Cas9 molecules, at least one Cas9 molecule is from a different species than the other Cas9 molecule(s). For example, when two gRNA molecules are used with two Cas9 molecules, one Cas9 molecule can be from one species and the other Cas9 molecule can be from a different species. Both Cas9 species are used to generate a single or double-strand break, as desired.

[2413] Knocking Down CXCR4 Mediated by an Enzymatically Inactive Cas9 (eiCas9) Molecule

[2414] A targeted knockdown approach reduces or eliminates expression of functional CXCR4 gene product. As described herein, in an embodiment, a targeted knockdown is mediated by targeting an enzymatically inactive Cas9 (eiCas9) molecule or an eiCas9 fused to a transcription repressor domain or chromatin modifying protein to alter transcription, e.g., to block, reduce, or decrease transcription, of the CXCR4 gene.

[2415] Methods and compositions discussed herein may be used to alter the expression of the CXCR4 gene to treat or prevent HIV infection or AIDS by targeting a promoter region of the CXCR4 gene. In an embodiment, the promoter region is targeted to knock down expression of the CXCR4 gene. A targeted knockdown approach reduces or eliminates expression of functional CXCR4 gene product. As described herein, in an embodiment, a targeted knockdown is mediated by targeting an enzymatically inactive Cas9 (eiCas9) or an eiCas9 fused to a transcription repressor domain or chromatin modifying protein to alter transcription, e.g., to block, reduce, or decrease transcription, of the CXCR4 gene.

[2416] In an embodiment, one or more eiCas9s may be used to block binding of one or more endogenous transcription factors. In another embodiment, an eiCas9 can be fused to a chromatin modifying protein. Altering chromatin status can result in decreased expression of the target gene. One or more eiCas9s fused to one or more chromatin modifying proteins may be used to alter chromatin status.

[2417] Multiplexing Alteration of Two or more Genes

[2418] The alteration, of two or more genes in the same cell or cells is referred to herein as “multiplexing”. Multiplexing constitutes the modification of at least two genes in the same cell or cells.

[2419] When two or more genes (e.g., CCR5 and CXCR4) are targeted for alteration, the two or more genes (e.g., CCR5 and CXCR4) may be altered sequentially or simultaneously. In an embodiment, the alteration of the CXCR4 gene is prior to the alteration of the CCR5 gene. In an embodiment, the alteration of the CXCR4 gene is concurrent with the alteration of the CCR5 gene. In an embodiment, the alteration of the CXCR4 gene is subsequent to the alteration of the CCR5 gene. In an embodiment, the effect of the alterations is synergistic. In an embodiment, the two or more genes (e.g., CCR5 and CXCR4) are altered sequentially in order to reduce the probability of introducing genomic rearrangements (e.g., translocations) involving the two target positions.

### VII. Delivery of Components to Target Cells, Formulations

[2420] The components, e.g., Cas9 molecules, gRNA molecules (e.g., Cas9 molecule/gRNA molecule complexes), and optionally donor template nucleic acids, can be introduced into target cells in a variety of forms using a variety of delivery methods and formulations, see, e.g., Tables 700 and 800. In an embodiment, one Cas9 molecule and two or more (e.g., 2, 3, 4, or more) different gRNA molecules are delivered. When a Cas9 is encoded as DNA for delivery, the DNA may typically but not necessarily include a control region, e.g., comprising a promoter, to effect expression. In an embodiment, the promoter is a constitutive promoter. Useful promoters for Cas9 molecule sequences include, e.g., CMV, EF-1a, EFS, MSCV, PGK, or CAG promoters. In an embodiment,the promoter is a constitutive promoter. Useful promoters for gRNAs include H1, 7SK, tRNA, and U6 promoters. Promoters with similar or dissimilar strengths can be selected to tune the expression of components. Sequences encoding a Cas9 molecule can comprise a nuclear localization signal (NLS), e.g., an SV40 NLS. In an embodiment, the sequence or sequences encoding a Cas9 molecule comprises at least two nuclear localization signals. In an embodiment a promoter for a Cas9 molecule may be inducible or cell specific.

[2421] Table 700 provides examples of how the components can be delivered to a target cell.

TABLE 700

| Elements | | | |
|---|---|---|---|
| Cas9 | gRNA | Donor | |
| Molecule(s) | molecule(s) | Template | Comments |
| DNA | RNA | DNA | In this embodiment, a Cas9 molecule, |
| | | | typically an eaCas9 molecule, is transcribed |
| | | | from DNA, and a gRNA is provided as in |
| | | | vitro transcribed or synthesized RNA. In an |
| | | | embodiment, multiple Cas9 molecules (e.g., |
| | | | 2 or 3 or 4), are transcribed from DNA, and |
| | | | multiple gRNAs (e.g., 2 or 3 or 4 or more) |
| | | | are provided as in vitro transcribed or |
| | | | synthesized RNA. In this embodiment, the |
| | | | donor template is provided as a separate |
| | | | DNA molecule. |
| mRNA | RNA | DNA | In this embodiment, a Cas9 molecule, |
| | | | typically an eaCas9 molecule, is translated |
| | | | from in vitro transcribed mRNA, and a |
| | | | gRNA is provided as in vitro transcribed or |
| | | | synthesized RNA. In an embodiment, |
| | | | multiple Cas9 molecules (e.g., 2 or 3 or 4), |
| | | | are translated from in vitro transcribed |
| | | | mRNA, and multiple gRNAs (e.g., 2 or 3 or |
| | | | 4 or more) are provided as in vitro |
| | | | transcribed or synthesized RNA. In this |
| | | | embodiment, the donor template is provided |
| | | | on the same DNA molecule that encodes the |
| | | | Cas9. |
| Protein | RNA | DNA | In this embodiment, an eaCas9 molecule is |
| | | | provided as a protein, and a gRNA is |
| | | | provided as transcribed or synthesized RNA. |
| | | | In an embodiment, multiple Cas9 molecules |
| | | | (e.g., 2 or 3 or 4), are provided as a protein, |
| | | | and multiple gRNAs (e.g., 2 or 3 or 4 or |
| | | | more) are provided as transcribed or |
| | | | synthesized RNA. In this embodiment, the |
| | | | donor template is provided as a DNA molecule. |

[2422] Table 800 summarizes various delivery methods for the components of a Cas system, e.g., the Cas9 molecule component or components, the gRNA molecule component or components, and/or the donor template component, as described herein.

TABLE 800

| | | Delivery | | | |
|---|---|---|---|---|---|
| | | into | Duration | | Type of |
| | | Non-Dividing | of | Genome | Molecule |
| Delivery Vector/Mode | | Cells | Expression | Integration | Delivered |
| Physical (e.g., electroporation, | | YES | Transient | NO | Nucleic Acids |
| particle gun, Calcium | | | | | and Proteins |
| Phosphate transfection, cell | | | | | |
| compression or squeezing) | | | | | |
| Viral | Retrovirus | NO | Stable | YES | RNA |
| | Lentivirus | YES | Stable | YES/NO with | RNA |
| | | | | modifications | |
| | Adenovirus | YES | Transient | NO | DNA |
| | Adeno-Associated | YES | Stable | NO | DNA |
| | Virus (AAV) | | | | |
| | Vaccinia Virus | YES | Very | NO | DNA |
| | | | Transient | | |
| | Herpes Simplex | YES | Stable | NO | DNA |
| | Virus | | | | |
| Non-Viral | Cationic | YES | Transient | Depends on | Nucleic Acids |
| | Liposomes | | | what is | and Proteins |
| | | | | delivered | |
| | Polymeric | YES | Transient | Depends on | Nucleic Acids |
| | Nanoparticles | | | what is | and Proteins |
| | | | | delivered | |
| Biological | Attenuated | YES | Transient | NO | Nucleic Acids |
| Non-Viral | Bacteria | | | | |
| Delivery | Engineered | YES | Transient | NO | Nucleic Acids |
| Vehicles | Bacteriophages | | | | |
| | Mammalian | YES | Transient | NO | Nucleic Acids |
| | Virus-like | | | | |
| | Particles | | | | |
| | Biological | YES | Transient | NO | Nucleic Acids |
| | liposomes: | | | | |
| | Erythrocyte | | | | |
| | Ghosts and | | | | |
| | Exosomes | | | | |

[2423] DNA-Based Delivery of a Cas9 Molecule and/or Donor Template

[2424] Nucleic acids encoding Cas9 molecules (e.g., eaCas9 molecules) and/or a donor template nucleic acid, or any combination (e.g., two or all) thereof, can be delivered into cells by art-known methods or as described herein. For example, Cas9-encoding DNA, as well as donor template nucleic acids, can be delivered, e.g., by vectors (e.g., viral or non-viral vectors), non-vector based methods (e.g., using naked DNA or DNA complexes), or a combination thereof.

[2425] DNA encoding Cas9 molecules (e.g., eaCas9 molecules) can be conjugated to molecules (e.g., N-acetylgalactosamine) promoting uptake by the target cells (e.g., the target cells described herein).

[2426] Donor template molecules can be conjugated to molecules to promote uptake by the target cells (e.g., the target cells described herein). In some embodiments, the Cas9-encoding DNA is delivered by a vector (e.g., viral vector/virus or plasmid).

[2427] A vector can comprise a sequence that encodes a Cas9 molecule. A vector can also comprise a sequence encoding a signal peptide (e.g., for nuclear localization, nucleolar localization, mitochondrial localization), fused, e.g., to a Cas9 molecule sequence. For example, a vector can comprise a nuclear localization sequence (e.g., from SV40) fused to the sequence encoding the Cas9 molecule.

[2428] One or more regulatory/control elements, e.g., a promoter, an enhancer, an intron, a polyadenylation signal, a Kozak consensus sequence, internal ribosome entry sites (IRES), a 2A sequence, and splice acceptor or donor can be included in the vectors. In some embodiments, the promoter is recognized by RNA polymerase II (e.g., a CMV promoter). In other embodiments, the promoter is recognized by RNA polymerase III (e.g., a U6 promoter). In some embodiments, the promoter is a regulated promoter (e.g., inducible promoter). In other embodiments, the promoter is a constitutive promoter. In some embodiments, the promoter is a viral promoter. In other embodiments, the promoter is a non-viral promoter.

[2429] In some embodiments, the vector or delivery vehicle is a viral vector (e.g., for generation of recombinant viruses). In some embodiments, the virus is a DNA virus (e.g., dsDNA or ssDNA virus). In other embodiments, the virus is an RNA virus (e.g., an ssRNA virus). Exemplary viral vectors/viruses include, e.g., retroviruses, lentiviruses, adenovirus, adeno-associated virus (AAV), vaccinia viruses, poxviruses, and herpes simplex viruses.

[2430] In some embodiments, the virus infects dividing cells. In other embodiments, the virus infects non-dividing cells. In some embodiments, the virus infects both dividing and non-dividing cells. In some embodiments, the virus can integrate into the host genome. In some embodiments, the virus is replication-competent. In other embodiments, the virus is replication-defective, e.g., having one or more coding regions for the genes necessary for additional rounds of virion replication and/or packaging replaced with other genes or deleted. In some embodiments, the virus causes transient expression of the Cas9 molecule or molecules. In other embodiments, the virus causes long-lasting, e.g., at least 1 week, 2 weeks, 1 month, 2 months, 3 months, 6 months, 9 months, 1 year, 2 years, or permanent expression, of the Cas9 molecule or molecules. The packaging capacity of the viruses may vary, e.g., from at least about 4 kb to at least about 30 kb, e.g., at least about 5 kb, 10 kb, 15 kb, 20 kb, 25 kb, 30 kb, 35 kb, 40 kb, 45 kb, or 50 kb.

[2431] In an embodiment, the viral vector recognizes a specific cell type. For example, the viral vector can be pseudotyped with a different/alternative viral envelope glycoprotein; engineered with a cell type-specific receptor (e.g., genetic modification(s) of one or more viral envelope glycoproteins to incorporate a targeting ligand such as a peptide ligand, a single chain antibody, or a growth factor); and/or engineered to have a molecular bridge with dual specificities with one end recognizing a viral glycoprotein and the other end recognizing a moiety of the target cell surface (e.g., a ligand-receptor, monoclonal antibody, avidin-biotin and chemical conjugation).

[2432] Exemplary viral vectors/viruses include, e.g., retroviruses, lentiviruses, adenovirus, adeno-associated virus (AAV), vaccinia viruses, poxviruses, and herpes simplex viruses.

[2433] In some embodiments, the Cas9-encoding DNA is delivered by a recombinant retrovirus. In some embodiments, the donor template nucleic acid is delivered by a recombinant retrovirus. In some embodiments, the retrovirus (e.g., Moloney murine leukemia virus) comprises a reverse transcriptase, e.g., that allows integration into the host genome. In some embodiments, the retrovirus is replication-competent. In other embodiments, the retrovirus is replication-defective, e.g., having one of more coding regions for the genes necessary for additional rounds of virion replication and packaging replaced with other genes, or deleted.

[2434] In some embodiments, the Cas9-encoding DNA is delivered by a recombinant lentivirus. For example, the lentivirus is replication-defective, e.g., does not comprise one or more genes required for viral replication. For example, the lentivirus is replication-defective, e.g., does not comprise one or more genes required for viral replication.

[2435] In some embodiments, the Cas9-encoding DNA is delivered by a recombinant adenovirus. In some embodiments, the donor template nucleic acid is delivered by a recombinant adenovirus.

[2436] In some embodiments, the Cas9-encoding DNA is delivered by a recombinant AAV. In some embodiments, the donor template nucleic acid is delivered by a recombinant AAV. In some embodiments, the AAV does not incorporate its geneome into that of a host cell, e.g., a target cell as describe herein. In some embodiments, the AAV can incorporate at least part of its genome into that of a host cell, e.g., a target cell as described herein. In some embodiments, the AAV is a self-complementary adeno-associated virus (scAAV), e.g., a scAAV that packages both strands which anneal together to form double stranded DNA. AAV serotypes that may be used in the disclosed methods, include AAV1, AAV2, modified AAV2 (e.g., modifications at Y444F, Y500F, Y730F and/or S662V), AAV3, modified AAV3 (e.g., modifications at Y705F, Y731F and/or T492V), AAV4, AAV5, AAV6, modified AAV6 (e.g., modifications at S663V and/or T492V), AAV8, AAV 8.2, AAV9, AAV rh 10, and pseudotyped AAV, such as AAV2/8, AAV2/5 and AAV2/6 can also be used in the disclosed methods. In an embodiment, an AAV capsid that can be used in the methods described herein is a capsid sequence from serotype AAV1, AAV2, AAV3, AAV4, AAV5, AAV6, AAV7, AAV8, AAV9, AAV.rh8, AAV.rh10, AAV.rh32/33, AAV.rh43, AAV.rh64R1, or AAV7m8.

[2437] In an embodiment, the Cas9-encoding DNA is delivered in a re-engineered AAV capsid, e.g., with 50% or greater, e.g., 60% or greater, 70% or greater, 80% or greater, 90% or greater, or 95% or greater, sequence homology with a capsid sequence from serotypes AAV1, AAV2, AAV3, AAV4, AAV5, AAV6, AAV7, AAV8, AAV9, AAV.rh8, AAV.rh10, AAV.rh32/33, AAV.rh43, or AAV.rh64R1.

[2438] In an embodiment, the Cas9-encoding DNA is delivered by a chimeric AAV capsid. In some embodiments, the donor template nucleic acid is delivered by a chimeric AAV capsid. Exemplary chimeric AAV capsids include, but are not limited to, AAV9i1, AAV2i8, AAV-DJ, AAV2G9, AAV2i8G9, or AAV8G9.

[2439] In an embodiment, the AAV is a self-complementary adeno-associated virus (scAAV), e.g., a scAAV that packages both strands which anneal together to form double stranded DNA.

[2440] In some embodiments, the Cas9-encoding DNA is delivered by a hybrid virus, e.g., a hybrid of one or more of the viruses described herein. In an embodiment, the hybrid virus is hybrid of an AAV (e.g., of any AAV serotype), with a Bocavirus, B19 virus, porcine AAV, goose AAV, feline AAV, canine AAV, or MVM.

[2441] A packaging cell is used to form a virus particle that is capable of infecting a target cell. Such a cell includes a 293 cell, which can package adenovirus, and a ψ2 cell or a PA317 cell, which can package retrovirus. A viral vector used in gene therapy is usually generated by a producer cell line that packages a nucleic acid vector into a viral particle. The vector typically contains the minimal viral sequences required for packaging and subsequent integration into a host or target cell (if applicable), with other viral sequences being replaced by an expression cassette encoding the protein to be expressed, e.g., components for a Cas9 molecule, e.g., two Cas9 components. For example, an AAV vector used in gene therapy typically only possesses inverted terminal repeat (ITR) sequences from the AAV genome which are required for packaging and gene expression in the host or target cell. The missing viral functions can be supplied in trans by the packaging cell line and/or plasmid containing E2A, E4, and VA genes from adenovirus, and plasmid encoding Rep and Cap genes from AAV, as described in “Triple Transfection Protocol.” Henceforth, the viral DNA is packaged in a cell line, which contains a helper plasmid encoding the other AAV genes, namely rep and cap, but lacking ITR sequences. In embodiment, the viral DNA is packaged in a producer cell line, which contains E1A and/or E1B genes from adenovirus. The cell line is also infected with adenovirus as a helper. The helper virus (e.g., adenovirus or HSV) or helper plasmid promotes replication of the AAV vector and expression of AAV genes from the helper plasmid with ITRs. The helper plasmid is not packaged in significant amounts due to a lack of ITR sequences. Contamination with adenovirus can be reduced by, e.g., heat treatment to which adenovirus is more sensitive than AAV.

[2442] In an embodiment, the viral vector has the ability of cell type recognition. For example, the viral vector can be pseudotyped with a different/alternative viral envelope glycoprotein; engineered with a cell type-specific receptor (e.g., genetic modification of the viral envelope glycoproteins to incorporate targeting ligands such as a peptide ligand, a single chain antibody, a growth factor); and/or engineered to have a molecular bridge with dual specificities with one end recognizing a viral glycoprotein and the other end recognizing a moiety of the target cell surface (e.g., ligand-receptor, monoclonal antibody, avidin-biotin and chemical conjugation).

[2443] In an embodiment, the viral vector achieves cell type specific expression. For example, a promoter can be constructed to restrict expression of the transgene (Cas 9) in only a specific target cell. The specificity of the vector can also be mediated by microRNA-dependent control of transgene expression. In an embodiment, the viral vector has increased efficiency of fusion of the viral vector and a target cell membrane. For example, a fusion protein such as fusion-competent hemagglutinin (HA) can be incorporated to increase viral uptake into cells. In an embodiment, the viral vector has the ability of nuclear localization. For example, a virus that requires the breakdown of the cell wall (during cell division) and therefore will not infect a non-diving cell can be altered to incorporate a nuclear localization peptide in the matrix protein of the virus thereby enabling the transduction of non-proliferating cells.

[2444] In some embodiments, the Cas9-encoding DNA is delivered by a non-vector based method (e.g., using naked DNA or DNA complexes). For example, the DNA can be delivered, e.g., by organically modified silica or silicate (Ormosil), electroporation, transient cell compression or squeezing (e.g., as described in Lee, et al, 2012, Nano Lett 12: 6322-27), gene gun, sonoporation, magnetofection, lipid-mediated transfection, dendrimers, inorganic nanoparticles, calcium phosphates, or a combination thereof.

[2445] In an embodiment, delivery via electroporation comprises mixing the cells with the Cas9-encoding DNA in a cartridge, chamber or cuvette and applying one or more electrical impulses of defined duration and amplitude. In an embodiment, delivery via electroporation is performed using a system in which cells are mixed with the Cas9-encoding DNA in a vessel connected to a device (e.g., a pump) which feeds the mixture into a cartridge, chamber or cuvette wherein one or more electrical impulses of defined duration and amplitude are applied, after which the cells are delivered to a second vessel.

[2446] In some embodiments, the Cas9-encoding DNA is delivered by a combination of a vector and a non-vector based method. In some embodiments, the donor template nucleic acid is delivered by a combination of a vector and a non-vector based method. For example, a virosome comprises a liposome combined with an inactivated virus (e.g., HIV or influenza virus), which can result in more efficient gene transfer, e.g., in a respiratory epithelial cell than either a viral or a liposomal method alone.

[2447] In an embodiment, the delivery vehicle is a non-viral vector. In an embodiment, the non-viral vector is an inorganic nanoparticle. Exemplary inorganic nanoparticles include, e.g., magnetic nanoparticles (e.g., Fe₃MnO₂) and silica. The outer surface of the nanoparticle can be conjugated with a positively charged polymer (e.g., polyethylenimine, polylysine, polyserine) which allows for attachment (e.g., conjugation or entrapment) of payload. In an embodiment, the non-viral vector is an organic nanoparticle (e.g., entrapment of the payload inside the nanoparticle). Exemplary organic nanoparticles include, e.g., SNALP liposomes that contain cationic lipids together with neutral helper lipids which are coated with polyethylene glycol (PEG) and protamine and nucleic acid complex coated with lipid coating.

[2448] Exemplary lipids for gene transfer are shown below in Table 900.

TABLE 900
Lipids Used for Gene Transfer

| Lipid | Abbreviation | Feature |
|---|---|---|
| 1,2-Dioleoyl-sn-glycero-3-phosphatidylcholine | DOPC | Helper |
| 1,2-Dioleoyl-sn-glycero-3-phosphatidylethanolamine | DOPE | Helper |
| Cholesterol | | Helper |
| N-[1-(2,3-Dioleyloxy)prophyl]N,N,N-trimethylammonium | DOTMA | Cationic |
| chloride | | |
| 1,2-Dioleoyloxy-3-trimethylammonium-propane | DOTAP | Cationic |
| Dioctadecylamidoglycylspermine | DOGS | Cationic |
| N-(3-Aminopropyl)-N,N-dimethyl-2,3-bis(dodecyloxy)-1-propanaminium | GAP-DLRIE | Cationic |
| bromide | | |
| Cetyltrimethylammonium bromide | CTAB | Cationic |
| 6-Lauroxyhexyl ornithinate | LHON | Cationic |
| 1-(2,3-Dioleoyloxypropyl)-2,4,6-trimethylpyridinium | 2Oc | Cationic |
| 2,3-Dioleyloxy-N-[2(sperminecarboxamido-ethyl]-N,N-dimethyl- | DOSPA | Cationic |
| 1-propanaminium trifluoroacetate | | |
| 1,2-Dioleyl-3-trimethylammonium-propane | DOPA | Cationic |
| N-(2-Hydroxyethyl)-N,N-dimethyl-2,3-bis(tetradecyloxy)-1-propanaminium | MDRIE | Cationic |
| bromide | | |
| Dimyristooxypropyl dimethyl hydroxyethyl ammonium bromide | DMRI | Cationic |
| 3β-[N-(N′,N′-Dimethylaminoethane)-carbamoyl]cholesterol | DC-Chol | Cationic |
| Bis-guanidium-tren-cholesterol | BGTC | Cationic |
| 1,3-Diodeoxy-2-(6-carboxy-spermyl)-propylamide | DOSPER | Cationic |
| Dimethyloctadecylammonium bromide | DDAB | Cationic |
| Dioctadecylamidoglicylspermidin | DSL | Cationic |
| rac-[(2,3-Dioctadecyloxypropyl)(2-hydroxyethyl)]-dimethylammonium | CLIP-1 | Cationic |
| chloride | | |
| rac-[2(2,3-Dihexadecyloxypropyl-oxymethyloxy)ethyl]trimethylammonium | CLIP-6 | Cationic |
| bromide | | |
| Ethyldimyristoylphosphatidylcholine | EDMPC | Cationic |
| 1,2-Distearyloxy-N,N-dimethyl-3-aminopropane | DSDMA | Cationic |
| 1,2-Dimyristoyl-trimethylammonium propane | DMTAP | Cationic |
| O,O′-Dimyristyl-N-lysyl aspartate | DMKE | Cationic |
| 1,2-Distearoyl-sn-glycero-3-ethylphosphocholine | DSEPC | Cationic |
| N-Palmitoyl D-erythro-sphingosyl carbamoyl-spermine | CCS | Cationic |
| N-t-Butyl-N0-tetradecyl-3-tetradecylaminopropionamidine | diC14-amidine | Cationic |
| Octadecenolyoxy[ethyl-2-heptadecenyl-3 hydroxyethyl] | DOTIM | Cationic |
| imidazolinium chloride | | |
| N1-Cholesteryloxycarbonyl-3,7-diazanonane-1,9-diamine | CDAN | Cationic |
| 2-(3-[Bis(3-amino-propyl)-amino]propylamino)-N-ditetradecylcarbamoylme- | RPR209120 | Cationic |
| ethyl-acetamide | | |
| 1,2-dilinoleyloxy-3-dimethylaminopropane | DLinDMA | Cationic |
| 2,2-dilinoleyl-4-dimethylaminoethyl-[1,3]-dioxolane | DLin-KC2-DMA | Cationic |
| dilinoleyl-methyl-4-dimethylaminobutyrate | DLin-MC3-DMA | Cationic |

[2449] Exemplary polymers for gene transfer are shown below in Table 1000.

TABLE 1000
Polymers Used for Gene Transfer

| Polymer | Abbreviation |
|---|---|
| Poly(ethylene)glycol | PEG |
| Polyethylenimine | PEI |
| Dithiobis(succinimidylpropionate) | DSP |
| Dimethyl-3,3′-dithiobispropionimidate | DTBP |
| Poly(ethylene imine) biscarbamate | PEIC |
| Poly(L-lysine) | PLL |
| Histidine modified PLL | |
| Poly(N-vinylpyrrolidone) | PVP |
| Poly(propylenimine) | PPI |
| Poly(amidoamine) | PAMAM |
| Poly(amido ethylenimine) | SS-PAEI |
| Triethylenetetramine | TETA |
| Poly(β-aminoester) | |
| Poly(4-hydroxy-L-proline ester) | PHP |
| Poly(allylamine) | |
| Poly(α[4-aminobutyl]-L-glycolic acid) | PAGA |
| Poly(D,L-lactic-co-glycolic acid) | PLGA |
| Poly(N-ethyl-4-vinylpyridinium bromide) | |
| Poly(phosphazene)s | PPZ |
| Poly(phosphoester)s | PPE |
| Poly(phosphoramidate)s | PPA |
| Poly(N-2-hydroxypropylmethacrylamide) | pHPMA |
| Poly (2-(dimethylamino)ethyl methacrylate) | pDMAEMA |
| Poly(2-aminoethyl propylene phosphate) | PPE-EA |
| Chitosan | |
| Galactosylated chitosan | |
| N-Dodacylated chitosan | |
| Histone | |
| Collagen | |
| Dextran-spermine | D-SPM |

[2450] In an embodiment, the vehicle has targeting modifications to increase target cell update of nanoparticles and liposomes, e.g., cell specific antigens, monoclonal antibodies, single chain antibodies, aptamers, polymers, sugars, and cell penetrating peptides. In an embodiment, the vehicle uses fusogenic and endosome-destabilizing peptides/polymers. In an embodiment, the vehicle undergoes acid-triggered conformational changes (e.g., to accelerate endosomal escape of the cargo). In an embodiment, a stimuli-cleavable polymer is used, e.g., for release in a cellular compartment. For example, disulfide-based cationic polymers that are cleaved in the reducing cellular environment can be used.

[2451] In an embodiment, the delivery vehicle is a biological non-viral delivery vehicle. In an embodiment, the vehicle is an attenuated bacterium (e.g., naturally or artificially engineered to be invasive but attenuated to prevent pathogenesis and expressing the transgene, e.g., Listeria monocytogenes, certain Salmonella strains, Bifidobacterium longum, and modified Escherichia coli). In an embodiment, the vehicle is a genetically modified bacteriophage (e.g., engineered phages having large packaging capacity, less immunogenic, containing mammalian plasmid maintenance sequences and having incorporated targeting ligands). In an embodiment, the vehicle is a mammalian virus-like particle. For example, modified viral particles can be generated (e.g., by purification of the “empty” particles followed by ex vivo assembly of the virus with the desired cargo). The vehicle can also be engineered to incorporate targeting ligands to alter cell type specificity. In an embodiment, the vehicle is a biological liposome. For example, the biological liposome is a phospholipid-based particle derived from human cells (e.g., erythrocyte ghosts, which are red blood cells broken down into spherical structures derived from the subject, or secretory exosomes —subject— (e.g., patient) derived membrane-bound nanovescicle (30-100 nm) of endocytic origin (e.g., can be produced from various cell types and can therefore be taken up by cells without the need of targeting ligands).

[2452] In an embodiment, one or more nucleic acid molecules (e.g., DNA molecules) other than the components of a Cas system, e.g., the Cas9 molecule component or components described herein, are delivered. In an embodiment, the nucleic acid molecule is delivered at the same time as one or more of the components of the Cas system are delivered. In an embodiment, the nucleic acid molecule is delivered before or after (e.g., less than about 30 minutes, 1 hour, 2 hours, 3 hours, 6 hours, 9 hours, 12 hours, 1 day, 2 days, 3 days, 1 week, 2 weeks, or 4 weeks) one or more of the components of the Cas system are delivered. In an embodiment, the nucleic acid molecule is delivered by a different means than one or more of the components of the Cas system, e.g., the Cas9 molecule component, are delivered. The nucleic acid molecule can be delivered by any of the delivery methods described herein. For example, the nucleic acid molecule can be delivered by a viral vector, e.g., an integration-deficient lentivirus, and the Cas9 molecule component or components can be delivered by electroporation, e.g., such that the toxicity caused by nucleic acids (e.g., DNAs) can be reduced. In an embodiment, the nucleic acid molecule encodes a therapeutic protein, e.g., a protein described herein. In an embodiment, the nucleic acid molecule encodes an RNA molecule, e.g., an RNA molecule described herein.

[2453] Delivery of RNA Encoding a Cas9 Molecule and/or gRNA Molecule

[2454] RNA encoding Cas9 molecules (e.g., eaCas9 molecules or eiCas9 molecules) and/or gRNA molecules, can be delivered into cells, e.g., target cells described herein, by art-known methods or as described herein. For example, Cas9-encoding and/or gRNA-encoding RNA can be delivered, e.g., by microinjection, electroporation, transient cell compression or squeezing (e.g., as described in Lee, et al., 2012, Nano Lett 12: 6322-27), lipid-mediated transfection, peptide-mediated delivery, or a combination thereof. Cas9-encoding and/or gRNA-encoding RNA can be conjugated to molecules to promote uptake by the target cells (e.g., target cells described herein).

[2455] In an embodiment, delivery via electroporation comprises mixing the cells with the RNA encoding Cas9 molecules (e.g., eaCas9 molecules, eiCas9 molecules or eiCas9 fusion proteins) and/or gRNA molecules in a cartridge, chamber or cuvette and applying one or more electrical impulses of defined duration and amplitude. In an embodiment, delivery via electroporation is performed using a system in which cells are mixed with the RNA encoding Cas9 molecules (e.g., eaCas9 molecules, eiCas9 molecules or eiCas9 fusion proteins) and/or gRNA molecules in a vessel connected to a device (e.g., a pump) which feeds the mixture into a cartridge, chamber or cuvette wherein one or more electrical impulses of defined duration and amplitude are applied, after which the cells are delivered to a second vessel. Cas9-encoding RNA can be conjugated to molecules to promote uptake by the target cells (e.g., target cells described herein).

[2456] Delivery of Cas9 Molecule Protein

[2457] Cas9 protein molecules (e.g., eaCas9 molecules, eiCas9 molecules or eiCas9 fusion proteins) can be delivered into cells by art-known methods or as described herein. For example, Cas9 protein molecules can be delivered, e.g., by microinjection, electroporation, transient cell compression or squeezing (e.g., as described in Lee, et al [2012] Nano Lett 12: 6322-27), lipid-mediated transfection, peptide-mediated delivery, or a combination thereof. Delivery can be accompanied by a gRNA. In some embodiments, Cas9 protein can be conjugated to molecules promoting uptake by the target cells (e.g., target cells described herein).

[2458] In an embodiment, delivery via electroporation comprises mixing the cells with the Cas9 molecules (e.g., eaCas9 molecules, eiCas9 molecules or eiCas9 fusion proteins) with or without gRNA molecules in a cartridge, chamber or cuvette and applying one or more electrical impulses of defined duration and amplitude. In an embodiment, delivery via electroporation is performed using a system in which cells are mixed with the Cas9 molecules (e.g., eaCas9 molecules, eiCas9 molecules or eiCas9 fusion proteins) with or without gRNA molecules in a vessel connected to a device (e.g., a pump) which feeds the mixture into a cartridge, chamber or cuvette wherein one or more electrical impulses of defined duration and amplitude are applied, after which the cells are delivered to a second vessel.

[2459] Ex Vivo Delivery

[2460] In some embodiments, components described in Table 700 are introduced into cells which are then introduced into the subject, e.g., cells are removed from a subject, manipulated ex vivo and then introduced into the subject. Methods of introducing the components can include, e.g., any of the delivery methods described in Table 800.

### VIII. Modified Nucleosides, Nucleotides, and Nucleic Acids

[2461] Modified nucleosides and modified nucleotides can be present in nucleic acids, e.g., particularly gRNA, but also nucleic acids encoding a Cas9 molecule. Modifications disclosed in this section can be made in addition to or instead of any of the specific gRNA molecule modifications described above. As described herein, “nucleoside” is defined as a compound containing a five-carbon sugar molecule (a pentose or ribose) or derivative thereof, and an organic base, purine or pyrimidine, or a derivative thereof. As described herein, “nucleotide” is defined as a nucleoside further comprising a phosphate group.

[2462] Modified nucleosides and nucleotides can include one or more of:

[2463] (i) alteration, e.g., replacement, of one or both of the non-linking phosphate oxygens and/or of one or more of the linking phosphate oxygens in the phosphodiester backbone linkage;

[2464] (ii) alteration, e.g., replacement, of a constituent of the ribose sugar, e.g., of the 2′ hydroxyl on the ribose sugar;

[2465] (iii) wholesale replacement of the phosphate moiety with “dephospho” linkers;

[2466] (iv) modification or replacement of a naturally occurring nucleobase;

[2467] (v) replacement or modification of the ribose-phosphate backbone;

[2468] (vi) modification of the 3′ end or 5′ end of the oligonucleotide, e.g., removal, modification or replacement of a terminal phosphate group or conjugation of a moiety; and

[2469] (vii) modification of the sugar.

[2470] The modifications listed above can be combined to provide modified nucleosides and nucleotides that can have two, three, four, or more modifications. For example, a modified nucleoside or nucleotide can have a modified sugar and a modified nucleobase. In an embodiment, every base of a gRNA is modified, e.g., all bases have a modified phosphate group, e.g., all are phosphorothioate groups. In an embodiment, all, or substantially all, of the phosphate groups of a unimolecular or modular gRNA molecule are replaced with phosphorothioate groups.

[2471] In an embodiment, modified nucleotides, e.g., nucleotides having modifications as described herein, can be incorporated into a nucleic acid, e.g., a “modified nucleic acid.” In some embodiments, the modified nucleic acids comprise one, two, three or more modified nucleotides. In some embodiments, at least 5% (e.g., at least about 5%, at least about 10%, at least about 15%, at least about 20%, at least about 25%, at least about 30%, at least about 35%, at least about 40%, at least about 45%, at least about 50%, at least about 55%, at least about 60%, at least about 65%, at least about 70%, at least about 75%, at least about 80%, at least about 85%, at least about 90%, at least about 95%, or about 100%) of the positions in a modified nucleic acid are a modified nucleotides.

[2472] Unmodified nucleic acids can be prone to degradation by, e.g., cellular nucleases. For example, nucleases can hydrolyze nucleic acid phosphodiester bonds. Accordingly, in one aspect the modified nucleic acids described herein can contain one or more modified nucleosides or nucleotides, e.g., to introduce stability toward nucleases.

[2473] Definitions of Chemical Groups

[2474] As used herein, “alkyl” is meant to refer to a saturated hydrocarbon group which is straight-chained or branched. Example alkyl groups include methyl (Me), ethyl (Et), propyl (e.g., n-propyl and isopropyl), butyl (e.g., n-butyl, isobutyl, t-butyl), pentyl (e.g., n-pentyl, isopentyl, neopentyl), and the like. An alkyl group can contain from 1 to about 20, from 2 to about 20, from 1 to about 12, from 1 to about 8, from 1 to about 6, from 1 to about 4, or from 1 to about 3 carbon atoms.

[2475] As used herein, “aryl” refers to monocyclic or polycyclic (e.g., having 2, 3 or 4 fused rings) aromatic hydrocarbons such as, for example, phenyl, naphthyl, anthracenyl, phenanthrenyl, indanyl, indenyl, and the like. In some embodiments, aryl groups have from 6 to about 20 carbon atoms.

[2476] As used herein, “alkenyl” refers to an aliphatic group containing at least one double bond.

[2477] As used herein, “alkynyl” refers to a straight or branched hydrocarbon chain containing 2-12 carbon atoms and characterized in having one or more triple bonds. Examples of alkynyl groups include, but are not limited to, ethynyl, propargyl, and 3-hexynyl.

[2478] As used herein, “arylalkyl” or “aralkyl” refers to an alkyl moiety in which an alkyl hydrogen atom is replaced by an aryl group. Aralkyl includes groups in which more than one hydrogen atom has been replaced by an aryl group. Examples of “arylalkyl” or “aralkyl” include benzyl, 2-phenylethyl, 3-phenylpropyl, 9-fluorenyl, benzhydryl, and trityl groups.

[2479] As used herein, “cycloalkyl” refers to a cyclic, bicyclic, tricyclic, or polycyclic non-aromatic hydrocarbon groups having 3 to 12 carbons. Examples of cycloalkyl moieties include, but are not limited to, cyclopropyl, cyclopentyl, and cyclohexyl.

[2480] As used herein, “heterocyclyl” refers to a monovalent radical of a heterocyclic ring system. Representative heterocyclyls include, without limitation, tetrahydrofuranyl, tetrahydrothienyl, pyrrolidinyl, pyrrolidonyl, piperidinyl, pyrrolinyl, piperazinyl, dioxanyl, dioxolanyl, diazepinyl, oxazepinyl, thiazepinyl, and morpholinyl.

[2481] As used herein, “heteroaryl” refers to a monovalent radical of a heteroaromatic ring system. Examples of heteroaryl moieties include, but are not limited to, imidazolyl, oxazolyl, thiazolyl, triazolyl, pyrrolyl, furanyl, indolyl, thiophenyl pyrazolyl, pyridinyl, pyrazinyl, pyridazinyl, pyrimidinyl, indolizinyl, purinyl, naphthyridinyl, quinolyl, and pteridinyl. In some embodiments, a heteroaryl is a 6-membered heteroaryl. In some embodiments a 6-membered heteroaryl is pyridinyl, pyrazinyl, pyridazinyl, or pyrimidinyl. In some embodiments, a 6-membered heteroaryl is optionally substituted with one, two or three C₁₋₄ alkyl and/or halogen groups.

[2482] Phosphate Backbone Modifications

[2483] The Phosphate Group

[2484] In some embodiments, the phosphate group of a modified nucleotide can be modified by replacing one or more of the oxygens with a different substituent. Further, the modified nucleotide, e.g., modified nucleotide present in a modified nucleic acid, can include the wholesale replacement of an unmodified phosphate moiety with a modified phosphate as described herein. In some embodiments, the modification of the phosphate backbone can include alterations that result in either an uncharged linker or a charged linker with unsymmetrical charge distribution.

[2485] Examples of modified phosphate groups include, phosphorothioate, phosphoroselenates, borano phosphates, borano phosphate esters, hydrogen phosphonates, phosphoroamidates, alkyl or aryl phosphonates and phosphotriesters. In some embodiments, one of the non-bridging phosphate oxygen atoms in the phosphate backbone moiety can be replaced by any of the following groups: sulfur (S), selenium (Se), BR₃ (wherein R can be, e.g., hydrogen, alkyl, or aryl), C (e.g., an alkyl group, an aryl group, and the like), H, NR₂ (wherein R can be, e.g., hydrogen, alkyl, or aryl), or OR (wherein R can be, e.g., alkyl or aryl). The phosphorous atom in an unmodified phosphate group is achiral. However, replacement of one of the non-bridging oxygens with one of the above atoms or groups of atoms can render the phosphorous atom chiral; that is to say that a phosphorous atom in a phosphate group modified in this way is a stereogenic center. The stereogenic phosphorous atom can possess either the “R” configuration (herein Rp) or the “S” configuration (herein Sp).

[2486] Phosphorodithioates have both non-bridging oxygens replaced by sulfur. The phosphorus center in the phosphorodithioates is achiral which precludes the formation of oligoribonucleotide diastereomers. In some embodiments, modifications to one or both non-bridging oxygens can also include the replacement of the non-bridging oxygens with a group independently selected from S, Se, B, C, H, N, and OR (R can be, e.g., alkyl or aryl).

[2487] The phosphate linker can also be modified by replacement of a bridging oxygen, (i.e., the oxygen that links the phosphate to the nucleoside), with nitrogen (bridged phosphoroamidates), sulfur (bridged phosphorothioates) and carbon (bridged methylenephosphonates). The replacement can occur at either linking oxygen or at both of the linking oxygens.

[2488] Replacement of the Phosphate Group

[2489] The phosphate group can be replaced by non-phosphorus containing connectors. In some embodiments, the charge phosphate group can be replaced by a neutral moiety.

[2490] Examples of moieties which can replace the phosphate group can include, without limitation, e.g., methyl phosphonate, hydroxylamino, siloxane, carbonate, carboxymethyl, carbamate, amide, thioether, ethylene oxide linker, sulfonate, sulfonamide, thioformacetal, formacetal, oxime, methyleneimino, methylenemethylimino, methylenehydrazo, methylenedimethylhydrazo and methyleneoxymethylimino.

[2491] Replacement of the Ribophosphate Backbone

[2492] Scaffolds that can mimic nucleic acids can also be constructed wherein the phosphate linker and ribose sugar are replaced by nuclease resistant nucleoside or nucleotide surrogates. In some embodiments, the nucleobases can be tethered by a surrogate backbone. Examples can include, without limitation, the morpholino, cyclobutyl, pyrrolidine and peptide nucleic acid (PNA) nucleoside surrogates.

[2493] Sugar Modifications

[2494] The modified nucleosides and modified nucleotides can include one or more modifications to the sugar group. For example, the 2′ hydroxyl group (OH) can be modified or replaced with a number of different “oxy” or “deoxy” substituents. In some embodiments, modifications to the 2′ hydroxyl group can enhance the stability of the nucleic acid since the hydroxyl can no longer be deprotonated to form a 2′-alkoxide ion. The 2′-alkoxide can catalyze degradation by intramolecular nucleophilic attack on the linker phosphorus atom.

[2495] Examples of “oxy”-2′ hydroxyl group modifications can include alkoxy or aryloxy (OR, wherein “R” can be, e.g., alkyl, cycloalkyl, aryl, aralkyl, heteroaryl or a sugar); polyethyleneglycols (PEG), O(CH₂CH₂O)ₙCH₂CH₂OR wherein R can be, e.g., H or optionally substituted alkyl, and n can be an integer from 0 to 20 (e.g., from 0 to 4, from 0 to 8, from 0 to 10, from 0 to 16, from 1 to 4, from 1 to 8, from 1 to 10, from 1 to 16, from 1 to 20, from 2 to 4, from 2 to 8, from 2 to 10, from 2 to 16, from 2 to 20, from 4 to 8, from 4 to 10, from 4 to 16, and from 4 to 20). In some embodiments, the “oxy”-2′ hydroxyl group modification can include “locked” nucleic acids (LNA) in which the 2′ hydroxyl can be connected, e.g., by a C₁₋₆ alkylene or C₁₋₆ heteroalkylene bridge, to the 4′ carbon of the same ribose sugar, where exemplary bridges can include methylene, propylene, ether, or amino bridges; O-amino (wherein amino can be, e.g., NH₂; alkylamino, dialkylamino, heterocyclylamino, arylamino, diarylamino, heteroarylamino, or diheteroarylamino, ethylenediamine, or polyamino) and aminoalkoxy, O(CH₂)ₙ-amino, (wherein amino can be, e.g., NH₂; alkylamino, dialkylamino, heterocyclylamino, arylamino, diarylamino, heteroarylamino, or diheteroarylamino, ethylenediamine, or polyamino). In some embodiments, the “oxy”-2′ hydroxyl group modification can include the methoxyethyl group (MOE), (OCH₂CH₂OCH₃, e.g., a PEG derivative).

[2496] “Deoxy” modifications can include hydrogen (i.e. deoxyribose sugars, e.g., at the overhang portions of partially ds RNA); halo (e.g., bromo, chloro, fluoro, or iodo); amino (wherein amino can be, e.g., NH₂; alkylamino, dialkylamino, heterocyclylamino, arylamino, diarylamino, heteroarylamino, diheteroarylamino, or amino acid); NH(CH₂CH₂NH)ₙCH₂CH₂-amino (wherein amino can be, e.g., as described herein), —NHC(O)R (wherein R can be, e.g., alkyl, cycloalkyl, aryl, aralkyl, heteroaryl or sugar), cyano; mercapto; alkyl-thio-alkyl; thioalkoxy; and alkyl, cycloalkyl, aryl, alkenyl and alkynyl, which may be optionally substituted with e.g., an amino as described herein.

[2497] The sugar group can also contain one or more carbons that possess the opposite stereochemical configuration than that of the corresponding carbon in ribose. Thus, a modified nucleic acid can include nucleotides containing e.g., arabinose, as the sugar. The nucleotide “monomer” can have an alpha linkage at the 1′ position on the sugar, e.g., alpha-nucleosides. The modified nucleic acids can also include “abasic” sugars, which lack a nucleobase at C-1′. These abasic sugars can also be further modified at one or more of the constituent sugar atoms. The modified nucleic acids can also include one or more sugars that are in the L form, e.g. L-nucleosides.

[2498] Generally, RNA includes the sugar group ribose, which is a 5-membered ring having an oxygen. Exemplary modified nucleosides and modified nucleotides can include, without limitation, replacement of the oxygen in ribose (e.g., with sulfur (S), selenium (Se), or alkylene, such as, e.g., methylene or ethylene); addition of a double bond (e.g., to replace ribose with cyclopentenyl or cyclohexenyl); ring contraction of ribose (e.g., to form a 4-membered ring of cyclobutane or oxetane); ring expansion of ribose (e.g., to form a 6- or 7-membered ring having an additional carbon or heteroatom, such as for example, anhydrohexitol, altritol, mannitol, cyclohexanyl, cyclohexenyl, and morpholino that also has a phosphoramidate backbone). In some embodiments, the modified nucleotides can include multicyclic forms (e.g., tricyclo; and “unlocked” forms, such as glycol nucleic acid (GNA) (e.g., R-GNA or S-GNA, where ribose is replaced by glycol units attached to phosphodiester bonds), threose nucleic acid (TNA, where ribose is replaced with α-L-threofuranosyl-(3′→2′)).

[2499] Modifications on the Nucleobase

[2500] The modified nucleosides and modified nucleotides described herein, which can be incorporated into a modified nucleic acid, can include a modified nucleobase. Examples of nucleobases include, but are not limited to, adenine (A), guanine (G), cytosine (C), and uracil (U). These nucleobases can be modified or wholly replaced to provide modified nucleosides and modified nucleotides that can be incorporated into modified nucleic acids. The nucleobase of the nucleotide can be independently selected from a purine, a pyrimidine, a purine or pyrimidine analog. In some embodiments, the nucleobase can include, for example, naturally-occurring and synthetic derivatives of a base.

[2501] Uracil

[2502] In some embodiments, the modified nucleobase is a modified uracil. Exemplary nucleobases and nucleosides having a modified uracil include without limitation pseudouridine (ψ), pyridin-4-one ribonucleoside, 5-aza-uridine, 6-aza-uridine, 2-thio-5-aza-uridine, 2-thio-uridine (s2U), 4-thio-uridine (s4U), 4-thio-pseudouridine, 2-thio-pseudouridine, 5-hydroxy-uridine (ho⁵U), 5-aminoallyl-uridine, 5-halo-uridine (e.g., 5-iodo-uridine or 5-bromo-uridine), 3-methyl-uridine (m³U), 5-methoxy-uridine (mo⁵U), uridine 5-oxyacetic acid (cmo⁵U), uridine 5-oxyacetic acid methyl ester (mcmo⁵U), 5-carboxymethyl-uridine (cm⁵U), 1-carboxymethyl-pseudouridine, 5-carboxyhydroxymethyl-uridine (chm⁵U), 5-carboxyhydroxymethyl-uridine methyl ester (mchm⁵U), 5-methoxycarbonylmethyl-uridine (mcm⁵U), 5-methoxycarbonylmethyl-2-thio-uridine (mcm⁵s2U), 5-aminomethyl-2-thio-uridine (nm⁵s2U), 5-methylaminomethyl-uridine (mnm⁵U), 5-methylaminomethyl-2-thio-uridine (mnm⁵s2U), 5-methylaminomethyl-2-seleno-uridine (mnm⁵se²U), 5-carbamoylmethyl-uridine (ncm⁵U), 5-carboxymethylaminomethyl-uridine (cmnm⁵U), 5-carboxymethylaminomethyl-2-thio-uridine (cmnm ⁵s2U), 5-propynyl-uridine, 1-propynyl-pseudouridine, 5-taurinomethyl-uridine (τcm⁵U), 1-taurinomethyl-pseudouridine, 5-taurinomethyl-2-thio-uridine(τm⁵s2U), 1-taurinomethyl-4-thio-pseudouridine, 5-methyl-uridine (m⁵U, i.e., having the nucleobase deoxythymine), 1-methyl-pseudouridine (m¹ψ), 5-methyl-2-thio-uridine (m⁵s2U), 1-methyl-4-thio-pseudouridine (m¹s⁴ψ), 4-thio-1-methyl-pseudouridine, 3-methyl-pseudouridine (m³ψ), 2-thio-1-methyl-pseudouridine, 1-methyl-1-deaza-pseudouridine, 2-thio-1-methyl-1-deaza-pseudouridine, dihydrouridine (D), dihydropseudouridine, 5,6-dihydrouridine, 5-methyl-dihydrouridine (m⁵D), 2-thio-dihydrouridine, 2-thio-dihydropseudouridine, 2-methoxy-uridine, 2-methoxy-4-thio-uridine, 4-methoxy-pseudouridine, 4-methoxy-2-thio-pseudouridine, N1-methyl-pseudouridine, 3-(3-amino-3-carboxypropyl)uridine (acp³U), 1-methyl-3-(3-amino-3-carboxypropyl)pseudouridine (acp³ψ), 5-(isopentenylaminomethyl)uridine (inm⁵U), 5-(isopentenylaminomethyl)-2-thio-uridine (inm⁵s2U), α-thio-uridine, 2′-O-methyl-uridine (Um), 5,2′-O-dimethyl-uridine (m⁵Um), 2′-O-methyl-pseudouridine (ψm), 2-thio-2′-O-methyl-uridine (s2Um), 5-methoxycarbonylmethyl-2′-O-methyl-uridine (mcm ⁵Um), 5-carbamoylmethyl-2′-O-methyl-uridine (ncm ⁵Um), 5-carboxymethylaminomethyl-2′-O-methyl-uridine (cmnm ⁵Um), 3,2′-O-dimethyl-uridine (m³Um), 5-(isopentenylaminomethyl)-2′-O-methyl-uridine (inm⁵Um), 1-thio-uridine, deoxythymidine, 2′-F-ara-uridine, 2′-F-uridine, 2′-OH-ara-uridine, 5-(2-carbomethoxyvinyl) uridine, 5-[3-(1-E-propenylamino)uridine, pyrazolo[3,4-d]pyrimidines, xanthine, and hypoxanthine.

[2503] Cytosine

[2504] In some embodiments, the modified nucleobase is a modified cytosine. Exemplary nucleobases and nucleosides having a modified cytosine include without limitation 5-aza-cytidine, 6-aza-cytidine, pseudoisocytidine, 3-methyl-cytidine (m³C), N4-acetyl-cytidine (act), 5-formyl-cytidine (f⁵C), N4-methyl-cytidine (m⁴C), 5-methyl-cytidine (m⁵C), 5-halo-cytidine (e.g., 5-iodo-cytidine), 5-hydroxymethyl-cytidine (hm⁵C), 1-methyl-pseudoisocytidine, pyrrolo-cytidine, pyrrolo-pseudoisocytidine, 2-thio-cytidine (s2C), 2-thio-5-methyl-cytidine, 4-thio-pseudoisocytidine, 4-thio-1-methyl-pseudoisocytidine, 4-thio-1-methyl-1-deaza-pseudoisocytidine, 1-methyl-1-deaza-pseudoisocytidine, zebularine, 5-aza-zebularine, 5-methyl-zebularine, 5-aza-2-thio-zebularine, 2-thio-zebularine, 2-methoxy-cytidine, 2-methoxy-5-methyl-cytidine, 4-methoxy-pseudoisocytidine, 4-methoxy-1-methyl-pseudoisocytidine, lysidine (k²C), α-thio-cytidine, 2′-O-methyl-cytidine (Cm), 5,2′-O-dimethyl-cytidine (m⁵Cm), N4-acetyl-2′-O-methyl-cytidine (ac⁴Cm), N4,2′-O-dimethyl-cytidine (m⁴Cm), 5-formyl-2′-O-methyl-cytidine (f⁵Cm), N4,N4,2′-O-trimethyl-cytidine (m⁴₂Cm), 1-thio-cytidine, 2′-F-ara-cytidine, 2′-F-cytidine, and 2′-OH-ara-cytidine.

[2505] Adenine

[2506] In some embodiments, the modified nucleobase is a modified adenine. Exemplary nucleobases and nucleosides having a modified adenine include without limitation 2-amino-purine, 2,6-diaminopurine, 2-amino-6-halo-purine (e.g., 2-amino-6-chloro-purine), 6-halo-purine (e.g., 6-chloro-purine), 2-amino-6-methyl-purine, 8-azido-adenosine, 7-deaza-adenosine, 7-deaza-8-aza-adenosine, 7-deaza-2-amino-purine, 7-deaza-8-aza-2-amino-purine, 7-deaza-2,6-diaminopurine, 7-deaza-8-aza-2,6-diaminopurine, 1-methyl-adenosine (m¹A), 2-methyl-adenosine (m²A), N6-methyl-adenosine (m⁶A), 2-methylthio-N6-methyl-adenosine (ms2m⁶A), N6-isopentenyl-adenosine (i⁶A), 2-methylthio-N6-isopentenyl-adenosine (ms²i⁶A), N6-(cis-hydroxyisopentenyl)adenosine (io⁶A), 2-methylthio-N6-(cis-hydroxyisopentenyl)adenosine (ms2io⁶A), N6-glycinylcarbamoyl-adenosine (g⁶A), N6-threonylcarbamoyl-adenosine (t⁶A), N6-methyl-N6-threonylcarbamoyl-adenosine (m⁶t⁶A), 2-methylthio-N6-threonylcarbamoyl-adenosine (ms²g⁶A), N6,N6-dimethyl-adenosine (m⁶₂A), N6-hydroxynorvalylcarbamoyl-adenosine (hn⁶A), 2-methylthio-N6-hydroxynorvalylcarbamoyl-adenosine (ms2hn⁶A), N6-acetyl-adenosine (ac⁶A), 7-methyl-adenosine, 2-methylthio-adenosine, 2-methoxy-adenosine, α-thio-adenosine, 2′-O-methyl-adenosine (Am), N⁶,2′-O-dimethyl-adenosine (m⁶Am), N⁶-Methyl-2′-deoxyadenosine, N6,N6,2′-O-trimethyl-adenosine (m⁶₂Am), 1,2′-O-dimethyl-adenosine (m¹Am), 2′-O-ribosyladenosine (phosphate) (Ar(p)), 2-amino-N6-methyl-purine, 1-thio-adenosine, 8-azido-adenosine, 2′-F-ara-adenosine, 2′-F-adenosine, 2′-OH-ara-adenosine, and N6-(19-amino-pentaoxanonadecyl)-adenosine.

[2507] Guanine

[2508] In some embodiments, the modified nucleobase is a modified guanine. Exemplary nucleobases and nucleosides having a modified guanine include without limitation inosine (I), 1-methyl-inosine (m¹I), wyosine (imG), methylwyosine (mimG), 4-demethyl-wyosine (imG-14), isowyosine (imG2), wybutosine (yW), peroxywybutosine (o₂yW), hydroxywybutosine (OHyW), undermodified hydroxywybutosine (OHyW*), 7-deaza-guanosine, queuosine (Q), epoxyqueuosine (oQ), galactosyl-queuosine (galQ), mannosyl-queuosine (manQ), 7-cyano-7-deaza-guanosine (preQ₀), 7-aminomethyl-7-deaza-guanosine (preQ₁), archaeosine (G⁺), 7-deaza-8-aza-guanosine, 6-thio-guanosine, 6-thio-7-deaza-guanosine, 6-thio-7-deaza-8-aza-guanosine, 7-methyl-guanosine (m⁷G), 6-thio-7-methyl-guanosine, 7-methyl-inosine, 6-methoxy-guanosine, 1-methyl-guanosine (m′G), N2-methyl-guanosine (m²G), N2,N2-dimethyl-guanosine (m²₂G), N2,7-dimethyl-guanosine (m²,7G), N2, N2,7-dimethyl-guanosine (m²,2,7G), 8-oxo-guanosine, 7-methyl-8-oxo-guanosine, 1-methyl-6-thio-guanosine, N2-methyl-6-thio-guanosine, N2,N2-dimethyl-6-thio-guanosine, α-thio-guanosine, 2′-O-methyl-guanosine (Gm), N2-methyl-2′-O-methyl-guanosine (m²Gm), N2,N2-dimethyl-2′-O-methyl-guanosine (m²₂Gm), 1-methyl-2′-O-methyl-guanosine (m′Gm), N2,7-dimethyl-2′-O-methyl-guanosine (m²,7Gm), 2′-O-methyl-inosine (Im), 1,2′-O-dimethyl-inosine (m′Im), O⁶-phenyl-2′-deoxyinosine, 2′-O-ribosylguanosine (phosphate) (Gr(p)), 1-thio-guanosine, O⁶-methyl-guanosine, O⁶-Methyl-2′-deoxyguanosine, 2′-F-ara-guanosine, and 2′-F-guanosine.

[2509] miRNA Binding Sites

[2510] microRNAs (or miRNAs) are naturally occurring cellular 19-25 nucleotide long noncoding RNAs. They bind to nucleic acid molecules having an appropriate miRNA binding site, e.g., in the 3′ UTR of an mRNA, and down-regulate gene expression. While not wishing to be bound by theory it is believed that the down regulation is either by reducing nucleic acid molecule stability or by inhibiting translation. An RNA species disclosed herein, e.g., an mRNA encoding Cas9 can comprise an miRNA binding site, e.g., in its 3′UTR. The miRNA binding site can be selected to promote down regulation of expression is a selected cell type. By way of example, the incorporation of a binding site for miR-122, a microRNA abundant in liver, can inhibit the expression of a gene in the liver.

XI. Governing gRNA Molecules and the Use thereof to Limit the Activity of a Cas9 System

[2511] Methods and compositions that use, or include, a nucleic acid, e.g., DNA, that encodes a Cas9 molecule or a gRNA molecule, can, in addition, use or include a “governing gRNA molecule.” The governing gRNA can limit the activity of the other CRISPR/Cas components introduced into a cell. In an embodiment, a gRNA molecule comprises a targeting domain that is complementary to a target domain on a nucleic acid that comprises a sequence that encodes a component of the CRISPR/Cas system that is introduced into a cell. In an embodiment, a governing gRNA molecule comprises a targeting domain that is complementary with a target sequence on: (a) a nucleic acid that encodes a Cas9 molecule; (b) a nucleic acid that encodes a gRNA which comprises a targeting domain that targets the gene (a target gene gRNA); or on more than one nucleic acid that encodes a CRISPR/Cas component, e.g., both (a) and (b). The governing gRNA molecule can complex with the Cas9 molecule to inactivate a component of the system. In an embodiment, a Cas9 molecule/governing gRNA molecule complex inactivates a nucleic acid that comprises the sequence encoding the Cas9 molecule. In an embodiment, a Cas9 molecule/governing gRNA molecule complex inactivates the nucleic acid that comprises the sequence encoding a target gene gRNA molecule. In an embodiment, a Cas9 molecule/governing gRNA molecule complex places temporal, level of expression, or other limits, on activity of the Cas9 molecule/target gene gRNA molecule complex. In an embodiment, a Cas9 molecule/governing gRNA molecule complex reduces off-target or other unwanted activity. In an embodiment, a governing gRNA molecule targets the coding sequence, or a control region, e.g., a promoter, for the CRISPR/Cas system component to be negatively regulated. For example, a governing gRNA can target the coding sequence for a Cas9 molecule, or a control region, e.g., a promoter, that regulates the expression of the Cas9 molecule coding sequence, or a sequence disposed between the two. In an embodiment, a governing gRNA molecule targets the coding sequence, or a control region, e.g., a promoter, for a target gene gRNA. In an embodiment, a governing gRNA, e.g., a Cas9-targeting or target gene gRNA-targeting, governing gRNA molecule, or a nucleic acid that encodes it, is introduced separately, e.g., later, than is the Cas9 molecule or a nucleic acid that encodes it. For example, a first vector, e.g., a viral vector, e.g., an AAV vector, can introduce nucleic acid encoding a Cas9 molecule, and a second vector, e.g., a viral vector, e.g., an AAV vector, can introduce nucleic acid encoding a governing gRNA molecule, e.g., a Cas9-targeting or target gene gRNA targeting, gRNA molecule. In an embodiment, the second vector can be introduced after the first. In other embodiments, a governing gRNA molecule, e.g., a Cas9-targeting or target gene gRNA targeting, governing gRNA molecule, or a nucleic acid that encodes it, can be introduced together, e.g., at the same time or in the same vector, with the Cas9 molecule or a nucleic acid that encodes it, but, e.g., under transcriptional control elements, e.g., a promoter or an enhancer, that are activated at a later time, e.g., such that after a period of time the transcription of Cas9 is reduced. In an embodiment, the transcriptional control element is activated intrinsically. In an embodiment, the transcriptional element is activated via the introduction of an external trigger.

[2512] Typically a nucleic acid sequence encoding a governing gRNA molecule, e.g., a Cas9-targeting gRNA molecule, is under the control of a different control region, e.g., promoter, than is the component it negatively modulates, e.g., a nucleic acid encoding a Cas9 molecule. In an embodiment, “different control region” refers to simply not being under the control of one control region, e.g., promoter, that is functionally coupled to both controlled sequences. In an embodiment, different refers to “different control region” in kind or type of control region. For example, the sequence encoding a governing gRNA molecule, e.g., a Cas9-targeting gRNA molecule, is under the control of a control region, e.g., a promoter, that has a lower level of expression, or is expressed later than the sequence which encodes is the component it negatively modulates, e.g., a nucleic acid encoding a Cas9 molecule.

[2513] By way of example, a sequence that encodes a governing gRNA molecule, e.g., a Cas9-targeting governing gRNA molecule, can be under the control of a control region (e.g., a promoter) described herein, e.g., human U6 small nuclear promoter, or human H1 promoter. In an embodiment, a sequence that encodes the component it negatively regulates, e.g., a nucleic acid encoding a Cas9 molecule, can be under the control of a control region (e.g., a promoter) described herein, e.g., CMV, EF-1a, EFS, MSCV, PGK, CAG control promoters.

### EXAMPLES

[2514] The following Examples are merely illustrative and are not intended to limit the scope or content of the invention in any way.

### Example 1

### Cloning and Initial Screening of gRNAs for Cas9 Molecules

[2515] The suitability of candidate gRNAs can be evaluated as described in this example. Although described for a chimeric gRNA, the approach can also be used to evaluate modular gRNAs.

[2516] Cloning gRNAs into Vectors

[2517] For each gRNA, a pair of overlapping oligonucleotides is designed and obtained. Oligonucleotides are annealed and ligated into a digested vector backbone containing an upstream U6 promoter and the remaining sequence of a long chimeric gRNA. Plasmid is sequence-verified and prepped to generate sufficient amounts of transfection-quality DNA. Alternate promoters may be used for in vitro transcription (e.g., a T7 promoter including modified T7 promoter as described herein where one or more of the 3′ terminal Gs have been removed).

[2518] Cloning gRNAs in Linear dsDNA Molecule (STITCHR)

[2519] For each gRNA, a single oligonucleotide is designed and obtained. The U6 promoter and the gRNA scaffold (e.g., including everything except the targeting domain, e.g., including sequences derived from the crRNA and tracrRNA, e.g., including a first complementarity domain; a linking domain; a second complementarity domain; a proximal domain; and a tail domain) are separately PCR amplified and purified as dsDNA molecules. The gRNA-specific oligonucleotide is used in a PCR reaction to stitch together the U6 and the gRNA scaffold, linked by the targeting domain specified in the oligonucleotide. Resulting dsDNA molecule (STITCHR product) is purified for transfection. Alternate promoters may be used to drive in vitro transcription (e.g., T7 promoter). Any gRNA scaffold may be used to create gRNAs compatible with Cas9 molecules from any bacterial species.

[2520] Initial gRNA Screen

[2521] Each gRNA to be tested is transfected, along with a plasmid expressing Cas9 and a small amount of a GFP-expressing plasmid into human cells. In preliminary experiments, these cells can be immortalized human cell lines such as 293T, K562 or U2OS. Alternatively, primary human cells may be used. In this case, cells may be relevant to the eventual therapeutic cell target (for example, an erythroid cell). The use of primary cells similar to the potential therapeutic target cell population may provide important information on gene targeting rates in the context of endogenous chromatin and gene expression.

[2522] Transfection may be performed using lipid transfection (such as Lipofectamine or Fugene) or by electroporation (such as Lonza Nucleofection). Following transfection, GFP expression can be determined either by fluorescence microscopy or by flow cytometry to confirm consistent and high levels of transfection. These preliminary transfections can comprise different gRNAs and different targeting approaches (17-mers, 20-mers, nuclease, dual-nickase, etc.) to determine which gRNAs/combinations of gRNAs give the greatest activity.

[2523] Efficiency of cleavage with each gRNA may be assessed by measuring NHEJ-induced indel formation at the target locus by a T7E1-type assay or by sequencing. Alternatively, other mismatch-sensitive enzymes, such as Cell/Surveyor nuclease, may also be used.

[2524] For the T7E1 assay, PCR amplicons are approximately 500-700 bp with the intended cut site placed asymmetrically in the amplicon. Following amplification, purification and size-verification of PCR products, DNA is denatured and re-hybridized by heating to 95° C. and then slowly cooling. Hybridized PCR products are then digested with T7 Endonuclease I (or other mismatch-sensitive enzyme) which recognizes and cleaves non-perfectly matched DNA. If indels are present in the original template DNA, when the amplicons are denatured and re-annealed, this results in the hybridization of DNA strands harboring different indels and therefore lead to double-stranded DNA that is not perfectly matched. Digestion products may be visualized by gel electrophoresis or by capillary electrophoresis. The fraction of DNA that is cleaved (density of cleavage products divided by the density of cleaved and uncleaved) may be used to estimate a percent NHEJ using the following equation: % NHEJ=(1−(1−fraction cleaved)^{1/2}). The T7E1 assay is sensitive down to about 2-5% NHEJ.

[2525] Sequencing may be used instead of, or in addition to, the T7E1 assay. For Sanger sequencing, purified PCR amplicons are cloned into a plasmid backbone, transformed, miniprepped and sequenced with a single primer. Sanger sequencing may be used for determining the exact nature of indels after determining the NHEJ rate by T7E1.

[2526] Sequencing may also be performed using next generation sequencing techniques. When using next generation sequencing, amplicons may be 300-500 bp with the intended cut site placed asymmetrically. Following PCR, next generation sequencing adapters and barcodes (for example Illumina multiplex adapters and indexes) may be added to the ends of the amplicon, e.g., for use in high throughput sequencing (for example on an Illumina MiSeq). This method allows for detection of very low NHEJ rates.

### Example 2

### Assessment of Gene Targeting by NHEJ

[2527] The gRNAs that induce the greatest levels of NHEJ in initial tests can be selected for further evaluation of gene targeting efficiency. In this case, cells are derived from disease subjects and, therefore, harbor the relevant mutation.

[2528] Following transfection (usually 2-3 days post-transfection,) genomic DNA may be isolated from a bulk population of transfected cells and PCR may be used to amplify the target region. Following PCR, gene targeting efficiency to generate the desired mutations (either knockout of a target gene or removal of a target sequence motif) may be determined by sequencing. For Sanger sequencing, PCR amplicons may be 500-700 bp long. For next generation sequencing, PCR amplicons may be 300-500 bp long. If the goal is to knockout gene function, sequencing may be used to assess what percent of alleles have undergone NHEJ-induced indels that result in a frameshift or large deletion or insertion that would be expected to destroy gene function. If the goal is to remove a specific sequence motif, sequencing may be used to assess what percent of alleles have undergone NHEJ-induced deletions that span this sequence.

### Example 3

### Assessing Effect of gRNA Modifications on T Cell Viability

[2529] In order to assess how gRNA modifications affect T cell viability, S. pyogenes Cas9 mRNA was delivered to Jurkat T cells in combination with an AAVS1 gRNA with or without modification. Specifically, 4 different combinations of modification were analyzed, (1) gRNA with a 5′ Anti-Reverse Cap Analog (ARCA) cap (see FIG. 11) and polyA tail, (2) gRNA with a 5′ ARCA cap only, (3) gRNA with a polyA tail only, (4) gRNA without any modification. In order to generate all of four of the aforemention versions of modified gRNAs, a DNA template comprising a T7 promoter, AAVS1 gRNA target sequence (GUCCCCUCCACCCCACAGUG) (SEQ ID NO:387), and S. pyogenes tracr sequence. For all gRNAs, T7 polymerase was used to generate the gRNA in the presence of 7.5 mM UTP, 7.5 mM GTP, 7.5 mM CTP and 7.5 mM ATP. In order to modify the gRNAs with a 5′ ARCA cap, 6.0 mM of ARCA analog was added to the NTP pool. Consequently, only 1.5 mM of GTP was added while the rest of the NTP pool remained at the same concentration: 7.5 mM UTP, 7.5 mM CTP and 7.5 mM ATP. In order to add a polyA tail to the gRNAs a recombinant polyA polymerase that was purified from E. coli was used to add a series of As to the end of the transcribed gRNA after the in vitro polymerase reaction was terminated. Termination was achieved by eliminating the DNA template with DNase I. The polyA tail reaction was performed for approximately 40 minutes. Regardless of the gRNA modification, all gRNA preparations were purified by phenol:choroform extraction followed by isopropanol precipitation. Once the gRNAs were generated, Jurkat T cells were electroporated with S. pyogenes Cas9 mRNA (modified with a 5′ ARCA cap and polyA tail) and one of the 4 different modified AAVS1-specific gRNAs. Following electroporation cell viability was determined by performing an Annexin-V and propidium iodide double stain. The fraction of live cells, which do not stain for Annexin-V and PI was determined by flow cytometry. The results are quantified in FIG. 12. Based on the fraction of live cells, it is concluded that gRNAs that have been modified with both a 5′ ARCA cap and polyA tail are the least toxic to Jurkat T cells when introduced by electroporation.

### Example 4

### Enzymatic Synthesis and Delivery of gRNAs to Primary T Cells

[2530] Delivery of Cas9 mRNA and gRNA as RNA Molecules to T Cells

[2531] To demonstrate Cas9-mediated cutting in primary CD4+ T cells, S. pyogenes Cas9 and a gRNA designed against the TCR beta chain (TRBC-210 (SEQ ID NO:388)) or the TCR alpha chain (TRAC-4 (SEQ ID NO:389)) were delivered ex vivo as RNA molecules to T cells via electroporation (see Table 1 for targeting domain sequences). In this embodiment, both the Cas9 and gRNA were in vitro transcribed using a T7 polymerase. A 5′ ARCA cap was added to both RNA species simultaneous to transcription while a polyA tail was added after transcription to the 3′ end of the RNA species by an E. coli polyA polymerase. To generate CD4+ T cells modified at the TRBC1 and TRBC2 loci, 10 ug of Cas9 mRNA and 10 ug of TRBC-210 gRNA (SEQ ID NO:388) were introduced to the cells by electroporation. In the same experiment, we also targeted the TRAC gene by introducing 10 ug of Cas9 mRNA with 10 ug of TRAC-4 gRNA (SEQ ID NO:389). A gRNA targeting the AAVS1 genomic site was used as an experimental control. Prior to electroporation, the T cells were cultured in RPMI 1640 supplemented with 10% FBS and recombinant IL-2. The cells were activated using CD3/CD28 beads and expanded for at least 3 days. Subsequent to introduction of the mRNA to the activated T cells, CD3 expression on the cells was monitored at 24, 48 and 72 hours post electroporation by flow cytometry using a fluorescein (APC) conjugated antibody specific for CD3. At 72 hours, a population of CD3 negative cells was observed (FIG. 13A and FIG. 13B). To confirm that the generation of CD3 negative cells was a result of genome editing at the TRBC loci, genomic DNA was harvested and a T7E1 assay was performed. Indeed, the data confirm the presence of DNA modifications at the TRBC2 locus and TRAC locus (FIG. 13C).

TABLE 1

| gRNA Name | Targeting Domain | Cas9 species |
|---|---|---|
| TRBC-210 | GCGCUGACGAUCUGGGUGAC | S. pyogenes |
| | (SEQ ID NO: 388) | |
| TRAC-4 | GCUGGUACACGGCAGGGUCA | S. pyogenes |
| | (SEQ ID NO: 389) | |

[2532] Delivery of Cas9/gRNA RNP to T Cells

[2533] To demonstrate Cas9-mediated cutting in Jurkat T cells, S. aureus Cas9 and a gRNA designed against the TCR alpha chain (TRAC-233 (SEQ ID NO:390)) were delivered ex vivo as a ribonucleic acid protein complex (RNP) by electroporation (see Table 2 for targeting domain sequences). In this embodiment, the Cas9 was expressed in E. coli and purified. Specifically, the HJ29 plasmid encoding Cas9 was transformed into Rosetta™ 2 (DE3) chemically competent cells (EMD Millipore #71400-4) and plated onto LB plates with appropriate antibiotics for selection and incubated at 37° C. overnight. A 10 mL starter culture of Brain Heart Infusion Broth (Teknova #B9993) with appropriate antibiotics was inoculated with 4 colonies and grown at 37° C. with shaking at 220 rpms. After growing overnight, the starter culture was added to 1 L of Terrific Broth Complete (Teknova #T7060) with appropriate antibiotics plus supplements and grown at 37° C. with shaking at 220 rpms. The temperature was gradually reduced to 18° C. and expression of the gene was induced by addition of IPTG to 0.5 mM when the OD600 was greater than 2.0. The induction was allowed to continue overnight followed by harvesting the cells by centrifugation and resuspension in TG300 (50 mM Tris pH8.0, 300 mM NaCl, 20% glycerol, 1 mM TCEP, protease inhibitor tablets (Thermo Scientific #88266)) and stored at −80° C.

[2534] The cells were lysed by thawing the frozen suspension, followed by two passes through a LM10 Microfluidizer® set to 18000 psi. The extract was clarified via centrifugation and the soluble extract was captured via batch incubation with Ni-NTA Agarose resin (Qiagen #30230) at 4° C. The slurry was poured into a gravity flow column, washed with TG300+30 mM Imidazole and then eluted the protein of interest with TG300+300 mM Imidazole. The Ni eluent was diluted with an equal volume of HG100 (50 mM Hepes pH7.5, 100 mM NaCl, 10% glycerol, 0.5 mM TCEP) and loaded onto a HiTrap SP HP column (GE Healthcare Life Sciences #17-1152-01) and eluted with a 30 column volume gradient from HG100 to HG1000 (50 mM Hepes pH7.5, 1000 mM NaCl, 10% glycerol, 0.5 mM TCEP). Appropriate fractions were pooled after assaying with an SDS-PAGE gel and concentrated for loading onto a SRT10 SEC300 column (Sepax #225300-21230) equilibrated in HG150 (10 mM Hepes pH7.5, 150 mM NaCl, 20% glycerol, 1 mM TCEP). Fractions were assayed by SDS-PAGE and appropriately pooled, concentrated to at least 5 mg/ml.

[2535] The gRNA was generated by in vitro transcription using a T7 polymerase. A 5′ ARCA cap was added to the RNA simultaneous to transcription while a polyA tail was added after transcription to the 3′ end of the RNA species by an E. coli polyA polymerase. Prior to introduction into the cells, the purified Cas9 and gRNA were mixed and allowed to form complexes for 10 minutes. The RNP solution was subsequently introduced into Jurkat T cells by electroporation. Prior to and after electroporation, the cells were cultured in RPMI1640 media supplemented with 10% FBS. CD3 expression on the cells was monitored at 24, 48 and 72 hours post electroporation by flow cytometry using a fluorescein conjugated antibody specific for CD3. At 48 and 72 hours, a population of CD3 negative cells was observed (FIG. 14A and FIG. 14B). To confirm that the generation of CD3 negative cells was a result of genome editing at the TRAC locus, genomic DNA was harvested and a T7E1 assay was performed. Indeed, the data confirm the presence of DNA modifications at the TRAC locus (FIG. 14C).

TABLE 2

| gRNA Name | Targeting Domain | Cas9 species |
|---|---|---|
| TRAC-233 | GUGAAUAGGCAGACAGACUUGU | S. aureus |
| | CA | |
| | (SEQ ID NO: 390) | |

### Example 5

### Assessment of Gene Targeting by HDR

[2536] The gRNAs that induce the greatest levels of NHEJ in initial tests can be selected for further evaluation of gene targeting efficiency. In this case, cells are derived from disease subjects and, therefore, harbor the relevant mutation.

[2537] Following transfection (usually 2-3 days post-transfection,) genomic DNA may be isolated from a bulk population of transfected cells and PCR may be used to amplify the target region. Following PCR, gene targeting efficiency can be determined by several methods.

[2538] Determination of gene targeting frequency involves measuring the percentage of alleles that have undergone homologous directed repair (HDR) with the exogenously provided donor template or endogenous genomic donor sequence and which therefore have incorporated the desired correction. If the desired HDR event creates or destroys a restriction enzyme site, the frequency of gene targeting may be determined by a RFLP assay. If no restriction site is created or destroyed, sequencing may be used to determine gene targeting frequency. If a RFLP assay is used, sequencing may still be used to verify the desired HDR event and ensure that no other mutations are present. If an exogenously provided donor template is employed, at least one of the primers is placed in the endogenous gene sequence outside of the region included in the homology arms, which prevents amplification of donor template still present in the cells. Therefore, the length of the homology arms present in the donor template may affect the length of the PCR amplicon. PCR amplicons can either span the entire donor region (both primers placed outside the homology arms) or they can span only part of the donor region and a single junction between donor and endogenous DNA (one internal and one external primer). If the amplicons span less than the entire donor region, two different PCRs should be used to amplify and sequence both the 5′ and the 3′ junction.

[2539] If the PCR amplicon is short (less than 600 bp) it is possible to use next generation sequencing. Following PCR, next generation sequencing adapters and barcodes (for example Illumina multiplex adapters and indexes) may be added to the ends of the amplicon, e.g., for use in high throughput sequencing (for example on an Illumina MiSeq). This method allows for detection of very low gene targeting rates.

[2540] If the PCR amplicon is too long for next generation sequencing, Sanger sequencing can be performed. For Sanger sequencing, purified PCR amplicons will be cloned into a plasmid backbone (for example, TOPO cloned using the LifeTech Zero Blunt® TOPO® cloning kit), transformed, miniprepped and sequenced.

[2541] The same or similar assays described above can be used to measure the percentage of alleles that have undergone HDR with endogenous genomic donor sequence and which therefore have incorporated the desired correction.

### Example 6

### Gene Targeting of the HBB Locus by CRISPR/Cas9 to Investigate Repair Pathway Choice in Response to Different Types of DNA Lesions

[2542] The CRISPR/Cas9 system was used to target the human HBB gene in the region of the sickle cell anemia-causing mutation.

[2543] To examine how the nature of the targeted break affects the frequency of different DNA repair outcomes, blunt double-strand breaks, single-strand nicks, and dual-nicks in which the nicks are placed on opposite strands and leave either 3′ or 5′ overhangs of varying lengths, were introduced by utilizing the wild type Cas9 nuclease, as well as two different Cas9 nickases. Several different DNA repair outcomes including indel mutations resulting from non-homologous end-joining, homology-dependent repair (HDR) using the donor as a template, and HDR using the closely related HBD gene as an endogenous template, were characterized using either single-strand oligonucleotide (ssODN) or plasmid DNA donors. The frequency of these various repair outcomes under different conditions offer insight into the mechanisms of DNA repair and how it is impacted by the nature of the DNA break. The data also indicates a therapeutic approach in which correction of the sickle-cell mutation is efficiently mediated through HDR with either a donor template or with the HBD gene.

[2544] In this study different gRNA molecules for the HBB region that surrounds the nucleotides encoding the amino acid most commonly mutated in sickle cell disease had been tested in 293T cells with wild type Cas9 molecule. The gRNAs that induced similar high rates of NHEJ and had PAMs facing in opposite orientations were selected to test as pairs with Cas9 D10A and Cas9 N863A nickases.

[2545] As shown in FIG. 16, the gRNA pair 8/15 (“HBB-8”/“HBB-15” pair) was selected as one of the best pairs of gRNA molecules. “HBB-8” has the targeting domain sequence of GUAACGGCAGACUUCUCCUC (SEQ ID NO:398) and “HBB-15” has the targeting domain sequence of AAGGUGAACGUGGAUGAAGU (SEQ ID NO:397). This pair of gRNAs in combination with the mutant Cas9 D10A would generate a 5′ overhang of 47 bp, and in combination with the mutant N863A would generate a 3′ overhang of 47 bp.

[2546] In this Example, U20S cells were electroporated with 200 ng of each gRNA and 750 ng of plasmid that encodes wild type Cas9 or mutant Cas9. Cells were collected 6 days after electroporation and genomic DNA was extracted. PCR amplification of the HBB locus was performed and subcloned into a Topo Blunt Vector. For each condition in each experiment 96 colonies were sequenced with Sanger sequencing. In the experiments assessing HDR efficacy, cells were electroporated with 2.5 ug of single stranded oligo or double stranded oligo in addition to the gRNA and the Cas9-encoding plasmid.

[2547] As shown in FIG. 17, the total percentages of all editing events detected by Sanger sequencing of the HBB locus were similar using wild type Cas9 or Cas9 nickases (D10A, N863A).

[2548] FIGS. 18A-18B show that a majority of the total gene editing events (about 3/4 of the total) were small deletions (<10 bp). This is consistent with the notion that wildtype Cas9 generates a blunt end which are preferentially repaired by canonical NHEJ. In contrast, deletions represented only about a quarter of the total events using either nickase (D10A or N863A). Moreover, larger deletions of ˜50 bp that can be mapped to the region between the two nickase sites were observed (FIG. 18A or 18C). The remaining gene-editing events were substantially different between the two nickases.

[2549] As shown in FIG. 19A, in the case of Cas9 D10A nickase which leaves a 5′ protruding end, the lesion is mostly repaired through a mechanism defined as gene conversion. In gene conversion, the HBD locus will serve as a template to repair the HBB gene. HBD is a highly similar gene (92% identity with HBB) that does not carry the sickle-cell mutation (FIG. 19B). FIG. 20 shows that the majority of the HBD sequence that got incorporated in the HBB locus was in the region between the nickase cuts. In contrast, a low frequency of gene conversion was observed when the N863 nicase was used (FIG. 19A). In the case of Cas9 N863A nickase, a majority of the gene editing events were insertions in which the inserted part was a duplication of the overhangs (FIGS. 20A-20B).

[2550] To test the effect that different lesions had on the engagement of HDR, a donor template was provided as a single strand oligo or as ds DNA donor. In both cases the length of the donor is approximately 170 bp with 60 bp of homology outside the nicks and with 8 mismatches (FIG. 22A). As shown in FIG. 22B, the Cas9 D10A nickase that resulted in a 5′ overhang gave a significantly higher rate of HDR, especially when using the upper stand as a single-strand oligo donor. FIG. 22C shows different forms of donors (dsDNA, upper stand, and lower strand) and there contribution to HDR.

[2551] In gene conversion, the HBD locus will serve as a template to repair the HBB gene. HBD is a highly similar gene (92% identity with HBB) that does not carry the sickle-cell mutation (FIG. 19B).

[2552] In summary, Cas9 nickases (D10A and N863A) showed comparable levels of efficacy compared to wildtype Cas9. Different DNA ends engage different repair pathways. The use of a wildtype Cas9 generates a blunt end, which are preferentially repaired by canonical NHEJ. Use of a Cas9 nickase with two gRNAs generates either 3′ or 5′ overhangs, which are not suitable substrates to be repaired by canonical NHEJ but can be repaired by alternative pathways.

[2553] The 5′ protruding end was mostly repaired through a mechanism called gene conversion in which the HBB gene is repaired by using the HBD locus as a template. Use of nickase is advantageous to promote HDR. In the experiments in which a donor was provided, a significantly higher rate of HDR was observed using a nickase compared to the wildtype Cas9. The nature of the donor template also influences the outcome as HDR was preferentially observed when an single stranded Oligo (ss Oligo) was used.

[2554] As shown in FIG. 23B, gene conversion was observed with Cas9 D10A with a single gRNA molecule, compared to two gRNA moleculess. With one single nickase, a reduction of the overall frequency of gene editing compared to the use of two pairs of gRNA molecules was observed, but there was a similar distribution across the different types of editing.

### Example 7

### Assessment of Gene Targeting in Hematopoietic Stem Cells

[2555] Transplantation of autologous CD34⁺ hematopoietic stem cells (HSCs, also known as hematopoietic stem/progenitor cells or HSPCs) genetically modified to correct the Sickle Cell Disease (SCD) mutation in the human hemoglobin gene (HBB) would prevent deformability (sickling) after deoxygenation in the erythrocyte progeny of corrected HSCs which could ameliorate symptoms associated with SCD. Genome editing with the CRISPR/Cas9 platform precisely alters endogenous gene targets by creating an indel at the targeted cut site that can lead to knock down of gene expression at the edited locus. In this Example, genome editing in the human K562 bone marrow erythroleukemia cell line, which serve as a proxy for HSCs and which can be predictive of genome editing in HSCs, were electroporated with Cas9 mRNA and gRNA pair 8/15 (“HBB-8”/“HBB-15” pair)to induce gene editing at the human HBB locus.

[2556] K562 cells were grown in RPMI media (Life Technologies) containing 10% fetal bovine serum (FBS). For the RNA electroporation, the Maxcyte GT device (www.maxcyte.com/) was used. S. pyogenes Cas9 mRNA and gRNA pair 8/15 (“HBB-8”/“HBB-15” pair) were prepared by in vitro transcription using linearized plasmid DNA as templates and the Ambion mMessage mMachine® T7 Ultra Transcription kit (Life Technologies) according to the manufacturer's instructions. In this embodiment, both the Cas9 and gRNA were in vitro transcribed using a T7 polymerase. For example, a 5′ ARCA cap was added to both RNA species simultaneous to transcription while a polyA tail was added after transcription to the 3′ end of the RNA species by an E. coli polyA polymerase. Capped and tailed gRNA pair 8/15 (“HBB-8”/“HBB-15” pair) were complexed at room temperature with S. pyogenes H-NLS-Cas9 protein at a molar ratio of ˜25:1 (gRNA: Cas9 protein) in a total of 30 μg RNP. Briefly, three million K562 cells were suspended in 100 μL Maxcyte EP buffer and transferred to the RNP solution (13 μL). In addition, K562 cells were electroporated with S. pyogenes Cas9 mRNA and each of the gRNA pair 8/15 (“HBB-8”/“HBB-15” pair). For the mRNA/gRNA electroporation with the Maxcyte device, 10 μg of HBB-8 (SEQ ID NO:398) (or 10 μg of HBB-15 (SEQ ID NO:397)) were mixed with 10 μg of Cas9 mRNA. Four million K562 cells were suspended in 100 μL Maxcyte EP buffer and then transferred to the mRNA/gRNA solution (13 μL). K562 cells mixed with either RNP or RNA were electroporated with the Maxcyte GT device. At 48 hours after electroporation, K562 cells were enumerated by trypan blue exclusion and were determined to have >88% viability in the electroporated cell populations. Genomic DNA was extracted from K562 cells 48 hours after electroporation and HBB locus-specific PCR reactions were performed.

[2557] In order to detect indels at the HBB locus, T7E1 assays were performed on HBB locus-specific PCR products that were amplified from genomic DNA samples from electroporated K562 cells and the percentage of indels detected at the HBB locus was calculated (FIG. 23A).

[2558] Co-delivery of 10 μg RNP which contains wild-type S. pyogenes Cas9 protein with HBB-8 or HBB-15 resulted in 26.8% and 16.1% indels, respectively, at the HBB locus in gDNA from K562 cells (molar ratio protein: gRNA 24:1). Co-delivery of Cas9 mRNA with HBB-8 (SEQ ID NO:398) or HBB-15 (SEQ ID NO:397) led to 66.9% and 29.5% indels at the HBB locus in gDNA from K562 cells (10 μg of each RNA/4 million cells). This example shows that delivery of Cas9 mRNA/gRNA and Cas9 RNPs leads to editing of the HBB locus in a relevant bone marrow derived hematopoietic cell line (K562 cells). Clinically, transplantation of autologous HSCs in which the HBB locus has been edited to correct the genetic mutation that causes red blood cell sickling could be used to ameliorate symptoms of SCD.

### Example 8

### Modification of gRNA by Addition of 5′ Cap and 3′ poly-A Tail Increases Genome Editing at Target Genetic Loci and Improves CD34+ Cell Viability and Survival

[2559] During virus-host co-evolution, viral RNA capping that mimics capping of mRNA evolved to allow viral RNA to escape detection from the cell's innate immune system (Delcroy et al., 2012, NATURE REVIEWS MICROBIOLOGY, 10:51-65). Toll-like receptors in hematopoietic stem/progenitor cells sense the presence of foreign single and double stranded RNA that can lead to innate immune response, cell senescence, and programmed cell death (Kajaste-Rudnitski and Naldini, 2015, HUMAN GENE THERAPY, 26:201-209). Results from initial experiments showed that human hematopoietic stem/progenitor cells electroporated with unmodified target specific gRNA and Cas9 mRNA led to reduced cell survival, proliferation potential, multipotency (e.g., loss of erythroid differentiation potential and skewed myeloid differentiation potential) compared to cells electroporated with GFP mRNA alone. Toward optimization of genome editing in hematopoietic/stem progenitor cells, human CD34⁺ cells from mobilized peripheral blood and bone marrow were electroporated with S. pyogenes Cas9 mRNA co-delivered with HBB or AAVS1 targeted gRNA in vitro transcribed with or without the addition of a 5′ cap and 3′ poly-A tail. Human CD34⁺ cells that were electroporated with Cas9 paired with a single uncapped and untailed HBB or AAVS1 gRNA exhibited decreased proliferation potential over 3 days in culture compared to cells that were electroporated with the same gRNA sequence that was in vitro transcribed to have a 5′ cap and a 3′ polyA tail (FIG. 24A). Other capped and tailed gRNAs (targeted to HBB, AAVS1, CXCR4, and CCR5 loci) delivered with Cas9 mRNA did not negatively impact HSPC viability, proliferation, or multipotency, as determined by comparison of the fold expansion of total live CD34⁺ cells over three days after delivery. Importantly, there was no difference in the proliferative potential of CD34⁺ cells contacted with capped and tailed gRNA and Cas9 mRNA compared to cells contacted with GFP mRNA or cells that were untreated. Analysis of cell viability (by co-staining with either 7-aminoactinomycin D or propidium iodide with AnnexinV antibody followed by flow cytometry analysis) at seventy-two hours after contacting Cas9 mRNA and gRNAs indicated that cells that contacted capped and tailed gRNAs expanded in culture and maintained viability HSPCs that contacted uncapped and tailed gRNAs exhibited a decrease in viable cell number (FIG. 24B). Viable cells (propidium iodide negative) that contacted capped and tailed gRNAs also maintained expression of the CD34 cell surface marker (FIG. 24C).

[2560] In addition to the improved survival, target cells that contacted capped and tailed AAVS1 specific gRNA also exhibited a higher percentage of on-target genome editing (% indels) compared to cells that contacted Cas9 mRNA and uncapped/untailed gRNAs (FIG. 25A). In addition, a higher level of targeted editing was detected in the progeny of CD34⁺ cells that contacted Cas9 mRNA with capped/tailed gRNA compared to the progeny of CD34⁺ cells that contacted Cas9 mRNA with uncapped/untailed gRNA (FIG. 25A, CFCs). Delivery of uncapped/untailed gRNA also reduced the ex vivo hematopoietic potential of CD34⁺ cells, as determined in colony forming cell (CFC) assays. Cells that contacted uncapped an untailed gRNAs with Cas9 mRNA exhibited a loss in total colony forming potential (e.g., potency) and a reduction in the diversity of colony subtype (e.g. loss of erythroid and progenitor potential and skewing toward myeloid macrophage phenotype in progeny) (FIG. 25B). In contrast, cells that contacted capped and tailed gRNAs maintained CFC potential both with respect to the total number of colonies differentiated from the CD34+ cells and with respect to colony diversity (detected of mixed hematopoietic colonies [GEMMS] and erythroid colonies [E]).

[2561] Next capped and tailed HBB specific gRNAs were co-delivered with either Cas9 mRNA or complexed with Cas9 ribonucleoprotein (RNP) and then electroporated into K562 cells, a erythroleukemia cell line that been shown to mimic certain characteristics of HSPCs. Co-delivery of capped and tailed gRNA with Cas9 mRNA or RNP led to high level of genome editing at the HBB locus, as determined by T7E1 assay analysis of HBB locus PCR products (FIG. 25C). Next, 3 different capped and tailed gRNAs (targeting the HBB, AAVS1, and CXCR4 loci) were co-delivered with S. pyogenes Cas9 mRNA into CD34⁺ cells isolated from umbilical cord blood (CB). Here, different amounts of gRNA (2 or 10 μg gRNA plus 10 μg of S. pyogenes Cas9 mRNA) were electroporated into the cells and the percentages of genome editing evaluated at target loci by T7E1 assay analysis of locus PCR products. In contrast, no cleavage was detected at the HBB locus in the genomic DNA from CB CD34⁺ cells that were electroporated with uncapped and untailed HBB gRNA with Cas9 mRNA. The results indicated that CB CD34⁺ cells electroporated with Cas9 mRNA and capped and tailed gRNAs maintained proliferative potential and colony forming potential. Five to 20% indels were detected at target loci and the amount of capped and tailed gRNA co-delivered with the Cas9 mRNA did not impact the percentage of targeted editing (FIG. 25D).

[2562] A representative gel image of the indicated locus specific PCR products after T7E1 assay was performed shows cleavage at the targeted loci in CB CD34⁺ cells 72 hours after delivery of capped and tailed locus-specific gRNAs (AAVS1, HBB, and CXCR4 gRNAs) co-delivered with S. pyogenes Cas9 mRNA by electroporation (FIG. 25F). Importantly, there was no difference in the viability of the cells electroporated with capped and tailed AAVS1-specific gRNA, HBB-specific gRNA, or CXCR4-specific gRNA co-delivered with S. pyogenes Cas9 mRNA compared to cells that did not contact Cas9 mRNA or gRNA (i.e., untreated control). Live cells are indicated by negative staining for 7-AAD and AnnexinV as determined by flow cytometry analysis (bottom left quadrants of flow cytometry plots, FIG. 25G). CB CD34⁺ cells electroporated with capped and tailed AAVS1 specific gRNA, HBB-specific gRNA, or CXCR4-specific gRNA co-delivered with S. pyogenes Cas9 mRNA maintained ex vivo hematopoietic colony forming potential as determined by CFC assays. The representation ex vivo hematopoietic potential in CFC assays for cells that contacted HBB-specific gRNA and Cas9 is shown in the FIG. 25E.

### Example 9

### A 5′ Cap and 3′ polyA Tail on a gRNA Improves the Viability and Gene Editing in Jurkat T Cells

[2563] To determine whether the addition of a cap and tail on a gRNA is important for cell viability and subsequent editing, K562s and Jurkat T cells were transfected with S. pyogenes Cas9 mRNA and an AAVS1 specific gRNA that was either modified or non-modified. In either condition, Cas9 mRNA was in vitro transcribed using a T7 polymerase with an ARCA cap added to the 5′ end during transcription. After transcription, a polyA tail was added to the 3′ end of the RNA species by an E. coli polyA polymerase. The modified gRNA was generated in the same fashion resulting in a gRNA that has a 5′ ARCA cap and polyA tail. The non-modified gRNA was generated by in vitro transcription using T7 polymerase. The non-modified gRNA did not have a 5′ ARCA cap or 3′ polyA tail. The K562s and Jurkat T cells were both grown in RPMI1640+10% FBS. The cells were electroporated with either 10 ug of Cas9 mRNA and 10 ug of a modified AAVS1 gRNA or 10 ug of Cas9 mRNA and 10 ug of a non-modified AAVS1 gRNA. At day 3 post electroporation, the cells were harvested and analyzed by Annexin V/PI staining to look at cell viability. Briefly, the cells were stained with an antibody that recognizes AnnexinV. Prior to analysis on a flow cytometer cells were stained with propidium iodide. Cells that remained unstained were considered “viable” cells and are shown in FIG. 26A. Gene editing rates were determined by harvesting genomic DNA at day 3, and a T7E1 assay was performed at the AAVS 1 insertion site locus and are shown in FIG. 26B.

### Example 10

### Delivery of Cas9/gRNA RNP to T Cells

[2564] To demonstrate Cas9-mediated cutting in primary human CD4⁺ or CD8⁺ T cells, S. aureus Cas9 and a gRNA designed against the TCR alpha chain (TRAC-233 (SEQ ID NO:390)) or S. pyogenes Cas9 and a gRNA designed against the TCR beta chain (TRBC-210 (SEQ ID NO:388)) or S. pyogenes Cas9 and a gRNA designed against PDCD1 (PDCD1-108 (SEQ ID NO:399)) were delivered as a ribonucleic acid protein complex (RNP) by electroporation (see Table 3 for targeting domain sequences). In this embodiment, the Cas9 was expressed in E. coli and purified. Specifically, the HJ29 plasmid encoding Cas9 was transformed into Rosetta™ 2 (DE3) chemically competent cells (EMD Millipore #71400-4) and plated onto LB plates with appropriate antibiotics for selection and incubated at 37° C. overnight. A 10 mL starter culture of Brain Heart Infusion Broth (Teknova #B9993) with appropriate antibiotics was inoculated with 4 colonies and grown at 37° C. with shaking at 220rpms. After growing overnight, the starter culture was added to 1 L of Terrific Broth Complete (Teknova #T7060) with appropriate antibiotics plus supplements and grown at 37° C. with shaking at 220 rpms. The temperature was gradually reduced to 18° C. and expression of the gene was induced by addition of IPTG to 0.5 mM when the OD600 was greater than 2.0. The induction was allowed to continue overnight followed by harvesting the cells by centrifugation and resuspension in TG300 (50 mM Tris pH8.0, 300 mM NaCl, 20% glycerol, 1 mM TCEP, protease inhibitor tablets (Thermo Scientific #88266)) and stored at −80° C.

TABLE 3

| gRNA Name | Targeting Domain | Cas9 species |
|---|---|---|
| TRAC-233 | GUGAAUAGGCAGACAGACUUGUCA | S. aureus |
| | (SEQ ID NO: 390) | |
| TRBC-210 | GCGCUGACGAUCUGGGUGAC (SEQ | S. pyogenes |
| | ID NO: 388) | |
| PDCD1-108 | GUCUGGGCGGUGCUACAACU (SEQ | S. pyogenes |
| | ID NO: 399) | |

[2565] The cells were lysed by thawing the frozen suspension, followed by two passes through a LM10 Microfluidizer® set to 18000 psi. The extract was clarified via centrifugation and the soluble extract was captured via batch incubation with Ni-NTA Agarose resin (Qiagen #30230) at 4° C. The slurry was poured into a gravity flow column, washed with TG300+30 mM Imidazole and then eluted the protein of interest with TG300+300 mM Imidazole. The Ni eluent was diluted with an equal volume of HG100 (50 mM Hepes pH7.5, 100 mM NaCl, 10% glycerol, 0.5 mM TCEP) and loaded onto a HiTrap SP HP column (GE Healthcare Life Sciences #17-1152-01) and eluted with a 30 column volume gradient from HG100 to HG1000 (50 mM Hepes pH7.5, 1000 mM NaCl, 10% glycerol, 0.5 mM TCEP). Appropriate fractions were pooled after assaying with an SDS-PAGE gel and concentrated for loading onto a SRT10 SEC300 column (Sepax #225300-21230) equilibrated in HG150 (10 mM Hepes pH7.5, 150 mM NaCl, 20% glycerol, 1 mM TCEP). Fractions were assayed by SDS-PAGE and appropriately pooled, concentrated to at least 5 mg/ml.

[2566] The gRNA was generated by in vitro transcription using a T7 polymerase. A 5′ ARCA cap was added to the RNA simultaneous to transcription while a polyA tail was added after transcription to the 3′ end of the RNA species by an E. coli polyA polymerase. Prior to introduction into the cells, the purified Cas9 and gRNA were mixed and allowed to form complexes for 10 minutes. The RNP solution was subsequently introduced into primary T cells by electroporation. In this embodiment, CD4⁺ or CD8⁺ T cells were isolated from the peripheral blood of donors. Briefly, the peripheral blood mononuclear cells were separated by FICOLL gradient centrifugation and subsequently treated with either a CD4 or CD8 specific antibody to positively select for the respective T cells. The cells, cultured in T cell media, were activated with CD3/CD28-conjugated beads and then electroporated with the aforementioned target specific RNPs. Cell viability was monitored each day for 4 days post electroporation and CD3 cell surface expression was monitored by flow cytometry using a fluorescein conjugated antibody specific for CD3 during the same period. By 2 days, a population of CD3 negative cells was observed (FIGS. 27A-27C, FIGS. 28A-28C, FIGS. 29A-29C) which continued to increase during the period of analysis. To confirm that the generation of CD3 negative cells was a result of genome editing at the TRAC or TRBC locus, genomic DNA was harvested and the TRAC and TRBC loci were amplified by specific PCR. The products were cloned into a sequencing vector and sequenced by Sanger sequencing. Indeed, the data confirm the presence of DNA modifications at the TRAC and TRBC locus (see FIG. 30; SEQ ID NOS:419-444 and FIG. 31; SEQ ID NOS:445-461).

[2567] PD-1 expression was monitored by FACS using a fluorescein conjugated antibody specific for PD-1. Since PD-1 is expressed on activated T cells, cells were reactivated 4 days post electroporation by incubating the cells for 48 hours with CD3/CD28-conjugated beads. The level of PD-1 expression was analyzed on the cells by FACS 24 hours post removal of the beads (7 days post electroporation). Cells that were treated with the PDCD1 specific RNP showed a marked reduction in PD-1 expression (FIGS. 32A-32C). To confirm that the generation of PD-1 negative cells was a result of genome editing at the PDCD1 locus, genomic DNA was harvested and the PDCD1 locus was amplified by PCR. The product was cloned into a sequencing vector and sequenced by Sanger sequencing. Indeed, the data confirm the presence of DNA modifications at PDCD1 locus (see FIG. 33; SEQ ID NOS:462-486).

### Example 11

### Contact between S. pyogenes Cas9 Ribonucleoprotein Complexed to gRNAs Targeting the HBB Genetic Locus Supports Gene Editing in Adult Human Hematopoietic Stem Cells

[2568] Transplantation of autologous CD34⁺ hematopoietic stem cells (HSCs) collected from patients affected with hemoglobinopathies (e.g., sickle cell disease [SCD], β-thalessemia), that have been genetically modified with a lentivirus vector that expresses non-sickling β-hemoglobin gene (HBB) has been shown to restore expression of functional adult hemoglobin (HbA) thus preventing the formation of sickle hemoglobin (HbSS), in erythroid cells derived from transduced CD34⁺ cells and ameliorating clinical symptoms in affected patients (Press Release from Bluebird Bio, Jun. 13, 2015, “bluebird bio Reports New Beta-thalassemia major and Severe Sickle Cell Disease Data from HGB-205 study at EHA”). However, delivery of a transgene encoding a non-sickling β-hemoglobin does not correct the causative mutation or prevent expression of the mutant (e.g., sickling) form of HBB. Furthermore, lentivirus vector transduction of CD34⁺ cells can lead to the occurrence of multiple transgene integration sites per cell and the long-term effects of multiple transgene integration sites is currently undetermined.

[2569] In contrast, genome editing with the CRISPR/Cas9 platform precisely alters endogenous gene targets by creating an insertion or deletion (indel) at the cut site that can lead to gene disruption at the edited locus. Co-delivery of two gRNAs each targeting regions proximal to the single nucleotide polymorphism (SNP) that encodes HbSS (e.g., GAG→GTG which results in a change in the amino acid residue from glutamic acid to valine) co-delivered with a Cas9 D10A nickase supports a low level of homology directed repair (HDR) in human cell lines (e.g., gene conversion using a region of homology in the HBD locus as DNA repair template).

[2570] In this Example, genome editing in adult human mobilized peripheral blood CD34⁺ HSCs after co-delivery of Cas9 D10A nickase with two gRNAs targeting the HBB locus was evaluated. The edited CD34⁺ cells were then differentiated into myeloid and erythroid cells to determine the hematopoietic activity of the HSCs. Gene editing at the HBB locus was evaluated by T7E1 analysis and DNA sequencing. Expression of HBB protein was also analyzed in erythroid progeny.

[2571] Human CD34⁺ HSCs cells from mobilized peripheral blood (AllCells®) were thawed into StemSpan Serum-Free Expansion Medium (SFEM™, StemCell Technologies) containing 300 ng/mL each of human stem cell factor (SCF) and flt-3 ligand (FL), 100 ng/mL thrombopoietin (TPO), and 60 ng/mL of IL-6, and 10 μM PGE2 (Cayman Biochemicals; all other supplements were from PeproTech® unless otherwise indicated). Cells were grown for 3 days in a humidified incubator and 5% CO₂ 20% O₂. On day 3 (morning), media was replaced with fresh Stemspan-SFEM™ supplemented with human SCF, TPO, FL and PGE2. In the afternoon of day 3, 2.5 million CD34⁺ cells per sample were suspended in electroporation buffer.

[2572] The gRNA was generated by in vitro transcription using a T7 polymerase. A 5′ ARCA cap was added to the RNA simultaneous to transcription while a polyA tail was added after transcription to the 3′ end of the RNA species by an E. coli polyA polymerase.

[2573] After the gRNAs were in vitro transcribed and tailed, the quality and quantity of gRNAs were evaluated with the Bioanalyzer (Nanochip®) to determine RNA concentration and by Differential Scanning Fluorimetry (DSF) assay, a thermal shift assay that quantifies the change in the thermal denaturation temperature of Cas9 protein with and without complexing to gRNA. In DSF assays, the Cas9 protein was mixed with gRNA and allowed to form complexes for 10 minutes. Cas9 protein and gRNA were mixed at a molar ration of 1:1, and the DSF assay performed as a measure of Cas9 stability and as an indirect measure of gRNA quality, since a 1:1 ratio of gRNA: Cas9 should support a thermal shift if the gRNA is of good quality (FIG. 34A).

[2574] For half of the samples, in vitro transcribed capped and tailed gRNAs HBB-8 (SEQ ID NO:398) and HBB-15 (SEQ ID NO:397) were added at a 2:1 molar ratio to 12.5 μg D10A Cas9 nickase ribonucleoprotein (RNP) (5 μg RNP per million cells) to 2.5 million cells. “HBB-8” has the targeting domain sequence of GUAACGGCAGACUUCUCCUC (SEQ ID NO:398) and “HBB-15” has the targeting domain sequence of AAGGUGAACGUGGAUGAAGU (SEQ ID NO:397). D10A nickase and gRNAs as RNP complexes were transferred to 2.5 million adult CD34⁺ cells in electroporation buffer. The RNP/cell mixture was transferred to the cells then electroporated (“Program 2” and “Program 3”) (Alt Program).

[2575] For the second portion of CD34⁺ cell samples, equal amounts (5 μg or 10 μg [2XgRNA] each) of in vitro transcribed capped and tailed gRNAs HBB-8 (SEQ ID NO:398) and HBB-15 (SEQ ID NO:397) were added to 10 μg of in vitro transcribed Cas9 D10A nickase mRNA. The mRNA: gRNA: cell mixture was electroporated with Program 2 (P2).

[2576] For all samples, the cells were collected and placed at 37° C. for 20 minutes (recovery period). Then the cells were either transferred to pre-warmed cytokine supplemented Stemspan-SFEM™ media and placed at 30° C. for 2 hours (cold shock samples) or placed directly into a 37° C. incubator. For the cold shocked samples, the cells were transferred to the 37° C. incubator after the 2-hour incubation period at 30° C. At 24, 48, and 72 hours after electroporation, the CD34⁺ cells were counted by trypan blue exclusion (cell survival) and divided into 3 portions for the following analyses: a) flow cytometry analysis for assessment of viability by co-staining with 7-Aminoactinomycin-D (7-AAD) and allophycocyanin (APC)-conjugated Annexin-V antibody (eBioscience); b) flow cytometry analysis for maintenance of HSC phenotype (after co-staining with phycoerythrin (PE)-conjugated anti-human CD34 antibody (BD Biosciences) and APC-conjugated CD133 (Miltenyi Biotech; c) hematopoietic colony forming cell (CFC) analysis by plating 800 cells in semi-solid methylcellulose based Methocult medium (StemCell Technologies H4435) that supports differentiation of erythroid and myeloid blood cell colonies from HSCs and serves as a surrogate assay to evaluate HSC multipotency and differentiation potential ex vivo; d) genomic DNA analysis for detection of editing at the HBB locus. Genomic DNA was extracted from the HSCs at 48 and 72 hours after electroporation and HBB locus-specific PCR reactions were performed. The purified PCR products were analyzed for insertions/deletions (indels) in T7E1 assays and by DNA sequencing of individual clones (PCR product was transformed and sub-cloned into TOPO-vector, individual colonies picked, and plasmid DNA containing individual PCR products were sequenced).

[2577] Western blot analysis of cell lysates extracted from the Cas9/gRNA electroporated CD34₊ cells indicated the presence of Cas9 protein at 72 hours after electroporation of CD34⁺ cells that received Cas9 RNP and gRNA pair. Very low levels of Cas9 protein were detected in the lysates of cells that were electroporated with Cas9 mRNA (FIG. 34B).

[2578] Electroporated CD34⁺ cells maintained a stem cell phenotype (e.g., co-expression of CD34 and CD133) and viability (e.g., 75% AnnexinV⁻7AAD⁻) as determined by flow cytometry analysis (FIG. 35A). The absolute number of viable CD34⁺ cells was maintained across most samples over a 72-hour culture period after electroporation (FIG. 35B). In addition, gene edited CD34⁺ cells maintained ex vivo hematopoietic activity and multipotency as indicated by their ability to give rise to erythroid (e.g., CFU-E or CFU-GEMM) and myeloid (e.g., CFU-G, -M or-GM) cells (FIG. 35C).

[2579] Gene editing at the HBB locus was then evaluated at 72 hours after electroporation of D10A nickase mRNA or RNP co-delivered with two gRNAs (HBB-8 (SEQ ID NO:398) and HBB-15 (SEQ ID NO:397)). Briefly, genomic (g)DNA was isolated from electroporated CD34⁺ cells at 72 hours after electroporation, and PCR amplification of a ˜607 bp fragment of the HBB locus (which captured both of the individual genomic locations that were targeted by the two gRNAs HBB-8 (SEQ ID NO:398) and HBB-15 (SEQ ID NO:397)) was performed. After cleanup of the HBB PCR product with AMPURE beads, insertions/deletions (indels) at the targeted genomic location were evaluated by T7E1 assay and by DNA sequencing. For the CD34⁺ cells electroporated with D10A nickase mRNA and HBB gRNA pair, no indels were detected (Table 4). In contrast to the negative results obtained after delivery of D10A nickase mRNA, ˜30-60% indels were detected by T7E1 and sequencing analysis of CD34⁺ cells that were electroporated with D10A nickase RNP with the HBB gRNA pair (Table 4, FIGS. 36A-36C). The cells that were cultured for 2 hours at 30° C. (after a 20-minute recovery period at 37° C.) exhibited 57% editing as determined by DNA sequencing. In addition, gene conversion (e.g., HBD genomic sequence used as a template copy for DNA repair of the disrupted HBB locus) was detected in the gDNA from CD34⁺ cells that were ‘cold shocked’ (30° C. incubation) at a frequency of 3% relative to the total gene editing events (FIG. 36C).

[2580] Table 4 shows a summary of gene editing results in human adult CD34⁺ HSCs 72 hours after co-delivery of D10A Cas9 nickase and HBB specific gRNA pair.

TABLE 4

| | | μg | μg | Temperature | | | |
|---|---|---|---|---|---|---|---|
| D10A | μg | HBB-8 | HBB-15 | of 2-hour | Electroporation | % indels | % indels |
| source | D10A | gRNA | gRNA | recovery | Program | (T7E1) | (sequencing) |
| mRNA | 10 | 5 | 5 | 37° C. | 2 | 0 | ND |
| mRNA | 10 | 5 | 5 | 30° C. | 2 | 0 | ND |
| mRNA | 10 | 10 | 10 | 37° C. | 2 | 0 | ND |
| RNP | 12.5 | 3.3 | 3.3 | 37° C. | 2 | 45 | 30 |
| RNP | 12.5 | 3.3 | 3.3 | 30° C. | 2 | 39 | 57 |
| RNP | 12.5 | 3.3 | 3.3 | 37° C. | 3 | 39 | 39 |

[2581] To determine whether targeted disruption of the HBB locus induced changes in expression of β-hemoglobin protein, CFU-E colonies were picked, dissociated, fixed, permeabilized and stained with PE-conjugated mouse anti-human β-hemoglobin antibody (Santa Cruz Biotechnology®). The erythroid progeny of HBB gene edited cells exhibited a 7-to-10 fold reduction in β-hemoglobin expression compared to the CFU-Es differentiated from untreated control CD34⁺ cells (FIG. 37). These data show that the progeny of gene edited cells retain erythroid differentiation potential and that gene editing events detected in the parental CD34⁺ cells result in reduced protein expression in erythroid progeny.

### Example 12

### Contact between S. pyogenes D10A Cas9 Nickase Ribonucleoprotein Complexed to gRNAs Targeting the HBB Genetic Locus Supports Gene Editing in Fresh Umbilical Cord Blood Derived Human CD34⁺ Hematopoietic Stem Cells

[2582] In this Example, genome editing in freshly collected human umbilical cord blood (CB) CD34⁺ HSCs after co-delivery of D10A Cas9 nickase with 2 gRNAs targeting the HBB locus was evaluated. The edited human CB CD34⁺ HSCs were then differentiated into myeloid and erythroid cells to determine the hematopoietic activity of the HSCs. Targeted disruption of the HBB locus was evaluated by T7E1 analysis and DNA sequencing.

[2583] Human CD34⁺ HSCs cells were isolated from freshly obtained human umbilical cord blood by ficoll gradient density centrifugation followed by MACS® (antibody conjugated immunomagnetic bead sorting) with mouse anti-human CD34⁺ immunomagnetic beads using the human CD34 cell enrichment kit and LS magnetic columns from Miltenyi Biotech. The cells were plated into StemSpan Serum-Free Expansion Medium (SFEM™, StemCell Technologies) containing 100 ng/mL each of human stem cell factor (SCF) and flt-3 ligand (FL), 20 ng/mL each of thrombopoietin (TPO) and IL-6, and 10 μM PGE2 (Cayman Biochemicals; all other supplements were from Peprotech unless otherwise indicated). Cells were grown for 3 days in a humidified incubator and 5% CO₂ 20% O₂. On day 3 (morning), media was replaced with fresh Stemspan-SFEM™ supplemented with human SCF, TPO, FL and PGE2. In the afternoon of day 3, 2.5 million CD34⁺ cells per sample were suspended in electroporation buffer.

[2584] The gRNAs were generated by in vitro transcription using a T7 polymerase. A 5′ ARCA cap was added to the RNA simultaneous to transcription while a polyA tail was added after transcription to the 3′ end of the RNA species by an E. coli polyA polymerase. After the gRNAs were in vitro transcribed and tailed, the quality and quantity of gRNAs were evaluated with the Bioanalyzer (Nanochip) to determine RNA concentration and by DSF assay performed as a measure of D10A Cas9 nickase RNP stability and as an indirect measure of gRNA quality.

[2585] In vitro transcribed capped and tailed gRNAs HBB-8 (SEQ ID NO:398) and HBB-15 (SEQ ID NO:397) were added at a 2:1 molar ratio (total gRNA: Cas9 protein) to 12.5 μg D10A nickase ribonucleoprotein (RNP) (5 μg RNP per million cells) to each of two samples each containing 2.5 million CB CD34⁺ cells. A third human CB CD34⁺ HSC aliquot was mixed with 25 μg D10A nickase RNP and HBB gRNAs (total gRNA: D10A ratio at 2:1). For each experimental sample, the D10A nickase RNP/cell mixture was transferred to the cells then electroporated.

[2586] For all samples, the cells were collected and placed at 37° C. for 20 minutes (recovery period). For the human CB CD34⁺ HSCs that were contacted with 12.5 μg D10A nickase RNP, one sample was transferred to pre-warmed cytokine supplemented Stemspan-SFEM™ media and placed at 30° C. for 2 hours (cold shock samples) or placed directly into the same media at 37° C. For the cold shocked samples, the cells were transferred to the 37° C. incubator after the 2-hour incubation period at 30° C. At 24, 48, and 72 hours after electroporation, the human CB CD34⁺ HSCs were counted by trypan blue exclusion (cell survival) and divided into 3 portions for the following analyses: a) flow cytometry analysis for assessment of viability by co-staining with 7-Aminoactinomycin-D (7-AAD) and allophycocyanin (APC)-conjugated Annexin-V antibody (eBioscience); b) flow cytometry analysis for maintenance of HSC phenotype (after co-staining with phycoerythrin (PE)-conjugated anti-human CD34 antibody (BD Biosciences) and APC-conjugated CD133 (Miltenyi Biotech; c) hematopoietic colony forming cell (CFC) analysis by plating 800 CB CD34⁺ HSCs in semi-solid methylcellulose based Methocult medium (StemCell Technologies H4435) that supports differentiation of erythroid and myeloid blood cell colonies from HSCs and serves as a surrogate assay to evaluate HSC multipotency and differentiation potential ex vivo; d) genomic DNA analysis for detection of editing at the HBB locus. Genomic DNA was extracted from the HSCs at 48 and 72 hours after electroporation and HBB locus-specific PCR reactions were performed. The purified PCR products were analyzed for insertions/deletions (indels) in T7E1 assays and by DNA sequencing of individual clones (PCR product was transformed and subcloned into TOPO-vector, individual colonies picked, and plasmid DNA containing individual PCR products were sequenced).

[2587] Electroporated CB CD34⁺ cells maintained a stem cell phenotype (e.g., co-expression of CD34 and CD133, ˜90% CD34⁺CD133⁺) and viability (e.g., 91% AnnexinV⁻7AAD⁻) as determined by flow cytometry analysis (FIG. 38A). The absolute number of viable CD34⁺ cells was maintained across most samples over a 72-hour culture period after electroporation. In addition, gene edited CD34⁺ cells maintained ex vivo hematopoietic activity and multipotency as indicated by their ability to give rise to erythroid (e.g., CFU-E or CFU-GEMM) and myeloid (e.g., CFU-G, -M, or -GM) cells (FIG. 38B).

[2588] Gene editing at the HBB locus was then evaluated at 72 hours after electroporation of D10A nickase RNP co-delivered with 2 gRNAs (HBB-8 (SEQ ID NO:398) and HBB-15 (SEQ ID NO:397)). Briefly, gDNA was isolated from electroporated CD34⁺ cells at 72 hours after electroporation, and PCR amplification of a ˜607 bp fragment of the HBB locus (which captures both of the individual genomic locations that were targeted by gRNAs HBB-8 (SEQ ID NO:398) and HBB-15 (SEQ ID NO:397)) was performed. After cleanup of the HBB PCR product with AMPURE beads, insertions/deletions (indels) at the targeted genomic location were evaluated by T7E1 assay and by DNA sequencing. For the CD34⁺ cells electroporated with 5 μg per million cells of D10A nickase RNP and HBB-specific gRNA pair, ˜20% indels were detected by T7E1 analysis (Table 5). In contrast to adult CD34⁺ cells, a 2-hour incubation at 30° C. did not alter the level of gene editing as determined by either T7E1 analysis or DNA sequence analysis. In addition, doubling the D10A nickase RNP/gRNA concentration to 10 μg RNP per million cells nearly doubled the gene editing at the HBB locus to 57%, as determined by DNA sequencing analysis (Table 5, FIGS. 39A-39C). Stratification of DNA repair events through DNA sequencing analysis revealed that ˜50-70% of the sequence reads contained small insertions, ˜20-40% contained large deletions, and ˜8% showed evidence of HBB/HBD gene conversion events in the targeted HBB genomic location (FIG. 39C).

[2589] Table 5 shows a summary of gene editing results in CB CD34⁺ cells 72 hours after co-delivery of D10A nickase RNP and HBB-specific gRNA pair.

TABLE 5

| Total μg | μg D10A | | | | | |
|---|---|---|---|---|---|---|
| D10A | nickase | μg | μg | Temperature | | |
| nickase | RNP/1E6 | HBB-8 | HBB-15 | of 2-hour | % indels | % indels |
| RNP | cells | gRNA | gRNA | recovery | (T7E1) | (sequencing) |
| 12.5 | 5 | 3.3 | 3.3 | 37° C. | 20 | 23 |
| 12.5 | 5 | 3.3 | 3.3 | 30° C. | 27 | 20 |
| 25 | 10 | 6.6 | 6.6 | 37° C. | 36 | 51 |

[2590] In contrast to human adult CD34⁺ cells, human CB CD34⁺ cells are fetal in origin and therefore the progeny of human CB CD34⁺ cells express fetal hemoglobin (HbF) which contains γ-hemoglobin instead of β-hemoglobin. Given the lack of β-hemoglobin by CB eyrthroblasts, disruption of the HBB locus in this model system will not impact expression of hemoglobin protein. Human CB CD34⁺ cells are used as a model system for evaluation of gene editing in HSCs, since these umbilical cord blood derived CD34⁺ cells are more readily available for research use and reconstitute immune-deficient mouse xenografts more efficiently compared to human adult CD34⁺ cells. To determine whether gene edited cells retained their erythroid differentiation potential, the edited human CD34⁺ cells were induced to differentiate into erythroblasts. Briefly, human CD34⁺ cells were co-cultured with human plasma, holotransferrin, insulin, hydrocortisone, and cytokines (erythropoietin, SCF, IL3)) for 20 days in which the latter 4 growth factors were added at different stages of differentiation to direct erythroid specification program. The cells were then evaluated by flow cytometry for the acquisition of erythroid phenotypic characteristics including: co-expression of the transferrin receptor (CD71) and Glycophorin A (CD235); expression of HbF, and enucleation (as indicated by the absence dsDNA detected by the dsDNA dye DRAQ5) and loss of CD45 expression. By day 18 of differentiation, the erythroblast progeny of edited CD34⁺ cells possessed this red blood cell phenotype (FIGS. 40A-40C). These data, along with the CFC data shown in FIGS. 38A-38B show that the gene editing does not negatively impact the differentiation potential of CD34⁺ cells.

[2591] In summary, the data in this Example indicate: 1) electroporation of fresh CB CD34⁺ HSCs with D10A nickase and paired capped/tailed gRNAs does not impact cell viability, proliferation potential, or multipotency; and 2) contact between human CB CD34⁺ HSCs and 10 μg D10A nickase RNP (per million cells) supports >50% gene editing with HDR events (8% gene conversion events of total).

### Example 13

### Contact between S. pyogenes Wild-Type Cas9 RNP or D10A Nickase RNP Complexed to gRNAs Targeting the HBB Genetic Locus Supports Up to 60% Gene Editing in Human Cord Blood Hematopoietic Stem Cells

[2592] In this Example, human umbilical cord blood (CB) CD34⁺ HSCs were contacted with S. pyogenes wild-type Cas9 RNP, N863A nickase RNP, or D10A nickase RNP complexed with 2 gRNAs targeting the HBB locus. The percentage of gene editing and type of editing event (e.g., HDR, [e.g., gene conversion] or NHEJ) were evaluated to determine the optimal Cas9 activity (e.g., type of cut, e.g., double strand break from wild-type Cas9 or off-set nicks on opposite DNA strands by nickases) for gene editing in HSCs that would favor HDR (e.g., gene conversion) over NHEJ (e.g., ends of the DNA left exposed after the cut, e.g., blunt ends left by wild-type Cas9 cut, 5′ overhang left by D10A nickase cut or 3′ overhang left by N863A nickase cut). Other optimizations included: 1) removal of endotoxin from Cas9 protein preparation to reduce toxicity of Cas9 protein; 2) use of 10 μg RNP per million CD34⁺ cells to increase gene editing (shown to double gene editing in fresh CB CD34⁺ cells compared to 5 μg RNP, as indicated in Example 12); 3) testing of human CD34⁺ cells that were isolated from cord blood (CB), cryopreserved, and confirm that gene editing was not impacted by cryopreservation (compared to freshly isolated HSCs, described in Example 12); and 4) evaluate Cas9 RNP levels in CD34⁻ cells over time to understand Cas9 RNP stability in HSCs.

[2593] Human CD34⁺ HSCs cells were isolated from freshly obtained human umbilical cord blood by ficoll gradient density centrifugation followed by MACS sorting with mouse anti-human CD34⁺ immunomagnetic beads. CD34₊ cells were cryopreserved, thawed at a later date, and plated into StemSpan Serum-Free Expansion Medium (SFEM™, StemCell Technologies) containing 100 ng/mL each of human stem cell factor (SCF) and flt-3 ligand (FL), 20 ng/mL each of thrombopoietin (TPO) and IL-6, and 10 μM PGE2 (Cayman Biochemicals; all other supplements were from PeproTech® unless otherwise indicated). Cells were grown for 3 days in a humidified incubator and 5% CO₂ 20% O₂. On day 3 (morning), media was replaced with fresh Stemspan-SFEM™ supplemented with human SCF, TPO, FL and PGE2. In the afternoon of day 3, 2.2 million CD34⁺ cells per sample were suspended in electroporation buffer.

[2594] The gRNAs were generated by in vitro transcription using a T7 polymerase. A 5′ ARCA cap was added to the RNA simultaneous to transcription while a polyA tail was added after transcription to the 3′ end of the RNA species by an E. coli polyA polymerase. After the gRNAs were in vitro transcribed and tailed, the quality and quantity of gRNAs were evaluated with the Bioanalyzer (Nanochip) to determine RNA concentration and by DSF assay performed as a measure of D10A Cas9 nickase RNP stability and as an indirect measure of gRNA quality.

[2595] In vitro transcribed capped and tailed guide gRNAs HBB-8 (SEQ ID NO:398) and HBB-15 (SEQ ID NO:397) were added at a 2:1 molar ratio (total gRNA: Cas9 protein) to 10 μg RNP per million cells. The RNPs tested include the following: wild-type (WT) Cas9, endotoxin-free WT Cas9, N863A nickase, D10A nickase. For each experimental sample, the D10A nickase RNP/cell mixture was transferred to the cells then electroporated.

[2596] For all samples, the cells were collected and placed at 37° C. for 20 minutes (recovery period). For the human CB CD34⁺ cells that were contacted with 10 μg D10A nickase RNP (per million cells), one sample was transferred to pre-warmed cytokine supplemented Stemspan-SFEM™ media and placed at 30° C. for 2 hours (cold shock recovery) or placed directly into the same media at 37° C. For the cold shocked samples, the cells were transferred to the 37° C. incubator after the 2-hour incubation period at 30° C. At 24, 48, and 72 hours after electroporation, the human CB CD34⁻ cells were counted by trypan blue exclusion (cell survival) and divided into 3 portions for the following analyses: a) flow cytometry analysis for assessment of viability by co-staining with 7-Aminoactinomycin-D (7-AAD) and allophycocyanin (APC)-conjugated Annexin-V antibody (eBioscience); b) flow cytometry analysis for maintenance of HSC phenotype (after co-staining with phycoerythrin (PE)-conjugated anti-human CD34 antibody (BD Biosciences) and APC-conjugated CD133 (Miltenyi Biotech; c) hematopoietic colony forming cell (CFC) analysis by plating 800 cells in semi-solid methylcellulose based Methocult medium (StemCell Technologies H4435) that supports differentiation of erythroid and myeloid blood cell colonies from HSCs and serves as a surrogate assay to evaluate HSC multipotency and differentiation potential ex vivo; d) genomic DNA analysis for detection of editing at the HBB locus; and e) Western blot analysis of protein to evaluate the stability of Cas9 RNP in human CD34⁺ HSCs. gDNA was extracted from the HSCs at 48 and 72 hours after electroporation and HBB locus-specific PCR reactions were performed. The purified PCR products were analyzed for insertions/deletions (indels) in T7E1 assays and by DNA sequencing of individual clones (PCR product was transformed and subcloned into TOPO-vector, individual colonies picked, and plasmid DNA containing individual PCR products were sequenced).

[2597] Electroporated human CB CD34⁺ cells maintained a stem cell phenotype (e.g., co-expression of CD34 and CD133, >90% CD34⁺CD133⁺) as determined by flow cytometry analysis. The absolute number of viable human CD34⁺ cells was maintained across most samples over a 72-hour culture period after electroporation (FIG. 41A). Gene edited human CD34⁺ cells maintained ex vivo hematopoietic activity and multipotency as indicated by their ability to give rise to erythroid (e.g., CFU-E, or CFU-GEMM) and myeloid (e.g., CFU-G, -M, or -GM) cells (FIG. 41B).

[2598] Gene editing at the HBB locus was then evaluated at 72 hours after electroporation of WT Cas9, N863A, or D10A nickases co-delivered with 2 gRNAs (HBB-8 (SEQ ID NO:398) and HBB-15 (SEQ ID NO:397)). Briefly, gDNA was isolated from electroporated human CD34⁺ cells at 72 hours after electroporation, and PCR amplification of a ˜607 bp fragment of the HBB locus (which captured both of the individual genomic locations that were targeted by gRNAs HBB-8 (SEQ ID NO:398) and HBB-15 (SEQ ID NO:397) was performed. After cleanup of the HBB PCR product with AMPURE beads, insertions/deletions (indels) at the targeted genomic location were evaluated by T7E1 assay and by DNA sequencing. For the CD34⁺ cells electroporated with WT Cas9 and endotoxin-free WT Cas9 the percentages of indels detected by T7E1 analysis at 72 hours was 59% and 51%, respectively (FIG. 42A), which correlated with the indels detected by DNA sequencing (Table 6). Human CD34⁺ cells electroporated with N863A Cas9 nickase and HBB-specific gRNA pair had only 1% indels detected by T7E1 analysis. CD34⁺ HSCs electroporated with D10A nickase with and without cold shock supported gene editing at percentages of 39% and 48% indels detected by T7E1 analysis, respectively. In order to confirm that this low level of editing observed in human CD34⁺ HSCs contacted with N863A nickase, was not due to the lack of N863A nickase RNP contacting the cells, western blot analysis was performed (FIG. 42B).

[2599] Cas9 protein was present in all electroporated samples (e.g., cells that received WT Cas9, D10A nickase, and N863A nickase). For these samples, Cas9 protein was detected at 24 and 48 hours after electroporation, suggesting that the lack of N863A nickase activity in the human CD34⁺ HSCs was not due to the lack of protein.

[2600] Gene editing in human CD34⁺ HSCs that contacted WT Cas9, endotoxin-free Cas9, and D10A nickase was 54-60%, based on DNA sequencing analysis (Table 6, FIG. 43A). Stratification of DNA repair events through DNA sequencing analysis revealed that >90% of the gene editing events were deletions in human CD34⁻ HSCs that contacted WT Cas9 and endotoxin-free (EF) WT Cas9 (insertions or combination of insertion and deletion comprised the remaining 3-6% of editing events) (FIG. 43A). In contrast, gDNA from human CD34⁺ HSCs that contacted D10A nickases had 3% HDR (e.g., gene conversion), up to 75% insertions, and up to 22% deletions (FIG. 43B).

[2601] Without wishing to be bound to any theory, the data in this Example suggest: 1) endotoxin removal does not negatively impact Cas9 functionality or human CD34⁺ HSC cell viability, proliferation potential, or multipotency; 2) use of 10 μg D10A nickase RNP supports 60% gene editing in human CD34⁺ HSCs with HDR events (e.g., gene conversion); and 3) after contacting human CD34⁺ HSCs, WT Cas9 and nickase RNPs are detected for up to 48 hours, but is not detectable thereafter.

[2602] Table 6 shows a summary of gene editing results in human CB CD34⁺ cells 72 hours after co-delivery of wild-type Cas9, N863A nickase, D10A nickase RNP and HBB-specific gRNA pair.

TABLE 6

| | Total μg | Temperature | | |
|---|---|---|---|---|
| | RNP/1E6 | of 2-hour | % indels | % indels |
| Cas9 | cells | recovery | (T7E1) | (sequencing) |
| WT | 10 | 37° C. | 59 | 56 |
| Endo-Free | 10 | 37° C. | 51 | 60 |
| WT | | | | |
| N863A | 10 | 37° C. | 1 | ND |
| D10A | 10 | 37° C. | 39 | 60 |
| D10A | 10 | 30° C. | 48 | 54 |

### Example 14

### Gene Editing at the HBB Locus in Human CD34⁺ Hematopoietic Stem/Progenitor Cells after Delivery of Cas9 Protein Complexed to In Vitro Transcribed Modified gRNAs Engineered with a polyA Tail Encoded in a DNA Template

[2603] Encoding Poly-A Tail in the DNA Template that Encodes the gRNA.

[2604] Adult human hematopoietic stem/progenitor cells (HSCs) electroporated with Cas9 and gRNAs that were unmodified (e.g., absence of ARCA cap and polyA tail) had reduced survival, viability, and hematopoietic potential and low percentages of gene editing compared to adult human HSCs that were electroporated with in vitro transcribed capped and tailed gRNAs (FIGS. 24A-C and FIGS. 25A-G). For all HSPC experiments, the DNA template that encoded gRNAs contained a modified T7 promoter sequence as described in Example 19, e.g., for gRNA target sequences that start with G (e.g., HBB-8), the GG at the 3′ end of the T7 promoter sequence was removed and for gRNA target sequences that did not start with G (e.g., HBB-15), the last G at the 3′ end of the T7 promoter sequence was removed. After in vitro transcription of the ARCA capped gRNA (mMessage Machine™ T7 Ultra Transcription Kit, Ambion), the gRNA was incubated with E. coli PolyA Polymerase (E-PAP), and the capped/tailed gRNA was then cleaned up using the MegaClear™ Kit (Ambion). The polyA tail added by E-PAP tailing reaction varied between experiments. In order to standardize the length of the polyA tail at the 3′ end of the gRNA, the 3′ antisense primers encoding the gRNA tracr were altered to contain specific length polyT sequences, which results in a DNA template for the specific length polyA tail. The length of polyA tails generated by the antisense primers were: 10, 20, 50, and 100. The DNA templates encoding HBB specific gRNAs (HBB-8 (SEQ ID NO:398) and HBB-15 (SEQ ID NO:397)) were generated by PCR and in vitro transcribed with the mMessage Machine™ T7 Ultra Transcription Kit according to the manufacturer's protocol with one modification: the E-PAP tailing reaction was omitted since the polyA tail was encoded in the DNA template.

[2605] The PCR products generated from the reactions for in vitro transcription DNA templates for the HBB gRNAs with 10, 20, and 50 length polyA tails yielded clean PCR products (FIG. 44A). In contrast, the DNA template for the HBB gRNAs with 100 length polyA tails yielded several products of different sizes. Therefore, in vitro transcription was only performed with the HBB gRNA DNA templates with the 10A, 20A, and 50A length polyA tails encoded in the templates. The purified PCR products were in vitro transcribed with the mMessage Machine™ T7 Ultra Transcription Kit excluding the E-PAP tailing reaction, since the tails were encoded in the DNA template for each gRNA. Bioanalyzer results of the HBB gRNA products indicated gRNAs were generated of the appropriate size products consistent with the DNA templates (FIG. 44B) and the polyA tail lengths when encoded in the DNA templates yielded gRNA products of defined size compared to gRNAs generated with a polyA tail generated enzymatically by incubation with E-PAP.

[2606] In this example, human umbilical cord blood CD34⁺ HSCs were then electroporated with D10A Cas9 RNP complexed with HBB-8 (SEQ ID NO:398) and HBB-15 (SEQ ID NO:397) gRNAs with polyA tails of defined lengths (e.g., 10A, 20A, 50A). Viability analysis by flow cytometry (AnnexinV⁻7AAD⁻) indicated no difference in the percentage of live CD34⁺ cells 72 hours after electroporation with D10A Cas9 RNP complexed with gRNAs with engineered polyA tails of defined lengths compared to cells that were electroporated with D10A Cas9 RNP and gRNAs with polyA tails added enzymatically with E-PAP (FIG. 45A-45B). Gene editing for cells contacted with D10A RNP and gRNA pair (HBB-8 (SEQ ID NO:398) and HBB-15 (SEQ ID NO:397)) containing 10A or 20A length polyA tail was ˜51% based on T7E1 endonuclease assay (FIG. 45C). DNA sequence analysis by Sanger DNA sequencing of the HBB locus confirmed 61% and 59% gene editing was achieved in human CD34⁺ cells electroporated with Cas9 RNP containing gRNAs that were modified to have a 10A or 20A length tail, respectively (FIG. 45C). These findings indicate that D10A Cas9 protein complexed to gRNAs modified to include a 5′ cap and 3′ polyA tail of specific length supported gene editing in primary human hematopoietic stem/progenitor cells.

### Example 15

### A gRNA with a Specified Length of polyA Tail can be Used to Generate Viable, Edited Primary T Cells

[2607] In order to determine whether a gRNA with a specified 3′ poly-A tail length can be used to generate edited primary T cells, primary CD4+ T cells were electroporated with RNP complexes targeting PDCD1 or TRBC. ARCA-capped gRNAs, as described in Example 10, with a polyA tail of 10 or 20 were generated by in vitro transcription from polyA tail-encoded templates. The gRNAs were complexed with purified S. pyogenes protein to generate a RNP that targets PDCD1 (PDCD1-108 (SEQ ID NO:399)) or TRBC (TRBC-210 (SEQ ID NO:388)). Briefly, the templated polyA gRNAs were complexed with S. pyogenes Cas9 at a 2:1 molar ratio (gRNA:protein) for 15 minutes at room temperature prior to electroporation. The RNP complexes were delivered to primary T cells using electroporation. The primary T cells were activated prior to treatment using anti-CD3/CD28 conjugated activation beads. Post-electroporation, cells were allowed to recover for 72 hrs before taking a subset of the PDCD1-targeted cells for reactivation and subsequent PD1 FACS analysis. The TRBC targeted cells were cultured without stimulation post electroporation. Viability of the cells was monitored for the first 72 hours after electroporation (FIG. 46A and FIG. 47A). FACS analysis of PD1 and CD3 expression was performed 6 days after electroporation. Both the 10A and 20A templated gRNA containing RNPs were capable of generating significantly modified primary CD4+ T cells at both the PDCD1 and TRBC locus (FIG. 46B and FIG. 47B). These findings demonstrate that primary T cells can be effectively edited with a gRNA that is modified to contain a polyA tail of a specified length.

### Example 16

### Addition of a 20A polyA Tail to gRNA Improves Gene Editing by Wild-Type CRISPR/Cas9 Protein in Human CD34⁺ Cells without Reducing Cell Viability of Hematopoietic Activity

[2608] Previous experiments described earlier in this document indicated that modification of the 5′ and 3′ ends of gRNAs (e.g., addition of ARCA cap at the 5′ end and enzymatic addition of a polyA tail at the 3′ end by treatment with E-PAP) increases HSC viability and supports efficient gene editing in HSCs. The purpose of the current example was to determine whether an optimal, minimal, and specific 3′ end modification could be defined (e.g., poly-adenylation was the only 3′ end modification). The criteria for selecting a 3′ end modification is that the 3′ end modification does not reduce HSC viability and functionality (e.g., hematopoietic activity, e.g., colony forming potential) when complexed to Cas9 protein and electroporated into human HSCs and also is able to support efficient gene editing (e.g., high percentage of indel formation at targeted locus). In this example, several different modifications were engineered into the PCR DNA template for in vitro transcription of the gRNAs. For all gRNAs differentially modified at the 3′ end, each gRNA was in vitro transcribed and was modified at the 5′ end with an ARCA cap which was added during the in vitro transcription process. The HBB genetic locus was targeted for gene modification in which the sgRNA HBB-8 was modified to have the following 3′ end modifications: polyA tail of varying lengths (e.g., 2A, 5A, 10A, 15A, 20A, and 25A), poly(T) tail (e.g., 10T, 20T), and poly(G) tail (e.g., 10G, 20G). These modifications were assessed in the DNA IVT template by gel electrophoresis and in the gRNA product with the Bioanalyzer. After validation, the gRNAs were subjected to QC analysis in DSF shift assays, in which wild-type Cas9 protein was complexed with different molar ratios of gRNA to determine the optimal molar ratio of Cas9 protein: gRNA (e.g., 1:1, 1:1.5, 1:2, etc) at which the Cas9 protein was fully occupied or complexed with gRNA. Human CB CD34⁺ cells were then electroporated (e.g., Amaxa Nucleofector) with Cas9 RNP in which the gRNAs complexed to Cas9 protein were differentially modified on the 3′ end. Three days after electroporation, the CB CD34⁺ cells were analyzed for fold expansion (e.g., viability), HSC functionality (e.g., plated into CFC assays to test differentiation potential), and gDNA extracted from samples for assessment of gene editing at the target locus by T7E1 assay and DNA sequencing analysis of the human HBB locus specific PCR products. In this experiment, gRNAs with polyA tail modifications supported the highest frequency of gene editing, as determined both by T7E1 assay analysis (FIG. 48A) and DNA sequencing analysis (FIG. 48B). DNA sequencing analysis indicated that the optimal polyA tail length was 20As. CFC analysis of colony forming potential of the RNP treated cells indicated that gene edited CD34⁺ cells treated with RNP containing a gRNA with the 5′ and 3′ end maintained colony forming potential in comparison to untreated (negative) control cells from the same HSC donor.

### Example 17

### Combination of 5′ End and 3′ End Modifications to gRNAs Increase Gene Editing in HSCs that Maintain their Viability and Hematopoietic Activity Ex Vivo Using a CRISPR/Cas9 D10A Dual Nickase Approach

[2609] The purpose of this example was to determine whether both 5′ and 3′ end modifications are required to achieve both high gene editing and maintain HSC viability and functionality. In this example, the D10A Cas9 variant protein was complexed to modified HBB-8 (SEQ ID NO:398) and HBB-15 (SEQ ID NO:397) gRNAs (e.g., each modified gRNA was complexed with D10A protein). The two D10A RNP complexes in which each gRNA had the same 5′ and 3′ end modification were mixed and electroporated (Amaxa Nucleofector) into CB CD34+ cells (FIG. 49A). Three days after electroporation, CD34⁺ cells were analyzed for gene editing (e.g., T7E1 assay analysis of PCR products of the HBB locus) and by hematopoietic functionality ex vivo (e.g., CFC assay). In cells electroporated with Cas9 RNP containing gRNAs with no 5′ or 3′ end modifications, no gene editing was detected by T7E1 assay analysis (FIG. 49A). In contrast, addition of either a 5′ ARCA cap, a 3′ polyA tail (e.g., 10A or 20A), or both a 5′ cap and 3′ polyA tail supported ˜10% gene editing at the HBB locus. When a combination of 5′ and 3′ end modifications were used (e.g., two gRNAs modified to contain both a 5′ ARCA cap and a 3′ polyA tail), gene editing increased (e.g., about a 2.5-fold increase with the combination of a 5′ ARCA cap and 3′ 20A polyA tail compared to addition of a 5′ ARCA cap, a 3′ 10A polyA tail alone, or a 3′ 20A polyA tail alone). For all samples treated with RNPs containing gRNAs with different modifications, CFC potential was maintained (FIG. 49A, right panel).

[2610] In order to validate that the combination of 5′ and 3′ end modifications had a positive impact on both HSC maintenance and gene editing, CD34⁺ cells from another CB donor were electroporated with in vitro transcribed gRNAs (HBB-8 and HBB-15) complexed to D10A Cas9 nickase protein. Here, the gRNAs had a 5′ cap and 3′ 20A tail or unmodified 5′ end and a 20A polyA tail. Both samples had substantial levels of gene editing as determined by DNA sequence analysis (FIG. 49B). The subtypes of editing events detected include insertions, deletions, and gene conversion (HDR using HBD genomic sequence as DNA repair template).

[2611] Furthermore, any differences between the two samples in total gene editing levels (35% and 47%) could not be attributed to the gRNA modification, in that 10-20% is the normal sample to sample variability observed between electroporation replicates using the same RNP preparations and HSC donor. Importantly, the cells electroporated with D10A RNP containing gRNAs with both 5′ cap and 3′ polyA tail had higher fold expansion and colony forming potential, compared to cells treated with RNP containing 3′ modified gRNAs, suggesting that the combination of 5′ and 3′ end modifications, maintained HSC expansion and colony forming potential (FIG. 49B, middle and right panels).

[2612] In order to confirm the synergistic effect of modifying both the 5′ and 3′ ends of the gRNA an additional CB CD34⁺ cells were obtained from an additional donor, and then the cells were electroporated with in vitro transcribed gRNAs (HBB-8 and HBB-15) complexed to D10A protein. In this experiment, cells treated with RNP that contained unmodified gRNAs had the lowest level of gene editing, followed by cells treated with RNP that contained capped gRNAs (FIG. 49C). T7E1 analysis suggested no difference in the editing achieved by RNP containing gRNAs with a polyA tail (20A) alone and RNP containing capped/polyA tailed gRNAs. Gene editing was lower in cells treated with RNP containing unmodified gRNAs or gRNAs with a 5′ cap alone. However, analysis of hematopoietic activity (CFC potential) indicated that cells treated with RNP containing unmodified gRNAs or gRNAs modified at the 3′ end alone also gave rise to fewer hematopoietic colonies (FIG. 49C, right panel). These data suggest that modification of gRNAs with a 5′ cap and 3′ polyA tail of defined length (20A) supports gene editing in both adult and cord blood CD34+ cells that maintain their expansion, viability, and hematopoietic potential ex vivo.

### Example 18

### CRISPR/Cas9 RNP Supports Highly Efficient Gene Editing and HDR at the HBB Locus in Human Adult and Cord Blood CD34⁺ Hematopoietic Stem/Progenitor Cells from 15 Different Stem Cell Donors

[2613] To determine the reproducibility of Cas9 RNP mediated gene editing in hematopoietic stem/progenitor cells, cryopreserved CD34⁺ cells obtained from 15 different patient donors (12 cord blood CD34⁺ cell donors and 3 adult mobilized peripheral blood CD34⁺ cell donors) were thawed into StemSpan SFEM medium with human cytokines (SCF, TPO, FL, and IL6), 10 μMPGE2, with or without 1 μM SR1 for 48-72 hours and then electroporated with S. pyogenes Cas9 RNP (D10A nickase or WT) pre-complexed to gRNA targeting HBB (D10A nickase pre-complexed with HBB-8 or HBB-15 gRNAs and the 2 pre-complexed RNPs mixed and added to the CD34⁺ cells) or AAVS1 (WT Cas9 with sgRNA AAVS1-1). For all experiments described in this example, gRNAs were in vitro transcribed from a PCR template that encodes a modified T7 promoter, gRNA, and a polyA tail (20A) 3′ to the gRNA. An ARCA cap was added to the 5′ end of the gRNA in the in vitro transcriptions process, thus, all gRNAs tested in these experiments were modified gRNAs (i.e., modified at 5′ end with ARCA cap and 3′ end with polyA tail). For the 15 donor CD34⁺ cell populations tested in separate experiments, 5 experiments were conducted to test gene editing with WT Cas9 RNP delivery (sgRNA, either AAVS1-1 or HBB-8) and 10 experiments were conducted to test editing with D10A nickase and 2 gRNAs (HBB-8 (SEQ ID NO:398), and HBB-15 (SEQ ID NO:397)).

[2614] Composite analysis across the 15 separate experiments and donors showed 57% editing (mean±stdev: 56.9±8%) in cord blood CD34⁺ cells (56% with WT Cas9 RNP+sgRNA, 58% D10A RNP+2 gRNAs) and 51% editing (mean 51.3±10%) in adult mobilized peripheral blood CD34⁺ cells (FIG. 50A). Gene editing was determined by DNA sequencing analysis of genomic DNA that was extracted from CD34⁺ cells electroporated with Cas9 RNP. In depth analysis of the subtypes of editing events that occurred after CD34⁻ cells contacted Cas9 D10A RNP and 2 gRNAs (HBB-8 (SEQ ID NO:398) and HBB-15 (SEQ ID NO:397) showed that a mean of 31±11% of the events were insertions (range 11-41%), 14±6% were small deletions (range 5-17%), and 3±2% were repaired through gene conversion or HDR (range 2-7%) (FIG. 50B). Given that human CD34⁺ cells are highly sensitive to perturbation by electroporation or by contact with foreign proteins and nucleic acid, the viability of HSCs after contacting Cas9 RNP was evaluated by flow cytometry analysis for detection of viable (7-AAD⁻AnnexinV⁻) CD34⁺ cells. The percentage of viable CD34⁺ cells was measured by flow cytometry analysis and then the percentage of live CD34⁺ cells was multiplied by the total cell number which was determined by trypan blue exclusion after electroporation and then divided by the input cell number in order to calculate the fold expansion of untreated and RNP electroporated (treated) CD34⁺ cells from the same donor. The mean and standard deviation of RNP treated and control (i.e., untreated) cells for multiple donors (n=10) is shown (FIG. 50C). For each stem cell donor, the fold expansion of untreated control and RNP treated CD34⁺ cells from each donor was compared in a paired 2-tailed t-test to determine if RNP contact altered cell viability. Statistical analysis of these data showed no statistically significant difference between RNP treated and controlled CD34⁺ cells (RNP treated vs. control mean fold expansion: 1.5 vs. 2.0; P-value summary not significant, P-value=0.1217). To determine whether RNP treatment and gene editing affected HSC multipotency and differentiation potential, the mean colony forming cell potential (CFCs) and individual colony subtypes were scored and then analyzed in paired t-test (n=10). There were no significant differences detected in the total CFCs or the subsets of CFCs between RNP treated and control CD34⁺ cells (FIG. 50D). The level of disruption in individual CD34⁺ cells was then determined by DNA sequencing analysis of CFCs (each CFC is differentiated from a single CD34⁺ cells, thereby allowing for single cell analysis of HSCs by assaying the clonal progeny of the plated cells). DNA sequencing analysis of the HBB locus PCR products showed higher levels of gene editing detected the erythroid and myeloid progeny of the CD34+ (˜80-90% edited CFCs) from differentiated from mPB HSCs and CB HSCs (FIG. 50E). Monoallelic and biallelic editing of the locus was detected. A 2-hour cold shock after electroporation and before plating cells into colony assays altered the distribution of monoallelic and biallelic editing detected in the myeloid and erythroid CFC progeny of the edited CD34+ cells (FIGS. 50E and 50F).

### Example 19

### Modification of T7 Promoter Sequence for Optimal Activity of In Vitro Transcribed gRNAs

### Modification of T7 Promoter Sequence:

[2615] The DNA template encoding a T7 promoter (TAATACGACTCACTATAGG (SEQ ID NO:401)) or a modified T7 promoter (different variants described below), a 20-nt target sequence (CCR5_U43 (SEQ ID NO:488)), and the chimeric gRNA scaffold was assembled by PCR. The PCR's 5′ sense oligonucleotide consisted of the T7 promoter, gRNA targeting sequence (which is modified for each specific gRNA target site), and sequence from the 5′ end of the S. pyogenes tracr sequence (GTTTTAGAGCTAGAAATA (SEQ ID NO:402)). The 3′ anti-sense oligonucleotide (AAAAGCACCGACTCGGTGCCACTTTTTCAAGTTGATA (SEQ ID NO:403)) was the reverse complement to the 3′ end of the S. pyogenes tracr sequence. The DNA template for the PCR reactions was a plasmid containing the S. pyogenes gRNA tracr sequence. The amplified PCR product which was used as a DNA template for in vitro transcription of a target specific gRNA encoded the following: modified T7 promoter-gRNA target-tracr (description of modifications to T7 promoter is described below).

[2616] Given that the T7 RNA polymerase requires a G to initiate transcription, the T7 promoter typically has two Gs at its 3′ end to ensure transcription of the entire RNA sequence downstream of the promoter. The consequence, however, is that the transcript that is produced may contain at least one if not both of the Gs from the promoter sequence, which may alter the gRNA specificity or the interaction between the gRNA and the Cas9 protein. To address this concern in cases where the gRNA target sequence starts with a G (e.g., HBB_8 gRNA target region DNA template: G̅T̅A̅A̅C̅G̅G̅C̅A̅G̅A̅C̅T̅T̅C̅T̅C̅C̅T̅C̅ (SEQ ID NO:404)), the two GGs were removed from the T7 promoter sequence in the gRNA PCR template by designing a new 5′ sense primer (CACCGCTAGCTAATACGACTCACTATAGTAACGGCAGACTTCTCCTCGTTTTAGAGC TAGAAATA (SEQ ID NO:405) where the modified T7 promoter sequence is underlined). For gRNA target sequences that don't start with a G (e.g., HBB_15 gRNA target region DNA template: AAGGTGAACGTGGATGAAGT (SEQ ID NO:406)), the T7 promoter sequence encoded in the gRNA PCR template was modified such that only one of the Gs at the 3′ end of the T7 promoter was removed: (modified T7 promoter sequence: TAATACGACTCACTATAG (SEQ ID NO:487)).

[2617] A T7 promoter sequence and modified T7 promoter sequence is not limited to the sequences described herein. For example, T7 promoter sequences (and modifications thereof) can be at least any of the sequences referred to in “Promoters/Catalog/T7” of the Registry of Standard Biological Parts (located at the following http://address:partsigem.org/Promoters/Catalog/T7). It is to be understood that the present disclosure encompasses methods where a gRNA of the invention is prepared by in vitro transcription from a DNA template that includes a modified T7 promoter as described herein where one or more of the 3′ terminal Gs have been removed (e.g., where the sequence TAATACGACTCACTATAG (SEQ ID NO:487) is located immediately upstream of a targeting domain that lacks a G at it's 5′ end or the sequence TAATACGACTCACTATA (SEQ ID NO:407) is located immediately upstream of a targeting domain that has a G at it's 5′ end). Other variations on these modified T7 promoters will be recognized by those skilled in the art based on other T7 promoter sequences including at least any of the sequences referred to in “Promoters/Catalog/T7” of the Registry of Standard Biological Parts (located at the following http://address:parts.igem.org/Promoters/Catalog/T7 and incorporated herein by reference in its entirety).

[2618] To determine whether additional Gs at the 5′ end of the gRNA sequence alters gene editing of Cas9 RNP, DNA templates encoding the gRNAs were generated by PCR with a 5′ sense primer containing the T7 promoter (TAATACGACTCACTATAGG (SEQ ID NO:401)) or modified T7 promoter (TAATACGACTCACTATA (SEQ ID NO:407)) and gRNA sequences. The gRNAs were generated by in vitro transcription of the DNA templates with the Message Machine™ T7 Ultra Transcription Kit (Ambion) (Table 7). The single gRNAs in vitro transcribed from the T7 or modified T7 promoters (S. pyogenes gRNAs: CCR5_U43, AAVS1_1, S. aureus gRNA: CXCR4-836 which all include a G at the 5′ end of the targeting sequence) were complexed with wild-type Cas9 RNP and then delivered by transfection (lipofectamine) into 293FT cells. For the synthesized gRNAs, addition of two GGs to the 5′ end of these gRNAs reduced gene editing in 293FT cells from 48-52% to 0-10%, as indicated by T7E1 endonuclease assay analysis (Table 7). These data indicate that two GGs added to 5′ end of gRNA sequence reduced gene editing by Cas9 RNP.

[2619] Table 7 shows the percentage of gene editing in 293FT cells after co-delivery of wild-type Cas9 RNP with in vitro transcribed single gRNAs with two GGs added to 5′ end of sequence in the DNA template.

TABLE 7

| | Sequence of 5′ sense primers used for PCR production of | |
|---|---|---|
| | gRNA DNA template (T7promoter “GG”target tracr forward | % Indels |
| gRNA | primer) | (T7E1 assay) |
| S. pyogenes | CACCGCTAGCTAATACGACTCACTATAGCTGCCGCCC | 52% |
| CCR5_U43 | AGTGGGACTTGTTTTAGAGCTAGAAATA (SEQ ID | |
| | NO: 408) | |
| S. pyogenes | CACCGCTAGCTAATACGACTCACTATAGGGCTGCCG | 10% |
| CCR5_U43 + GG | CCCAGTGGGACTTGTTTTAGAGCTAGAAATA (SEQ ID | |
| | NO: 409) | |
| S. aureus | CACCGCTAGCTAATACGACTCACTATAGCTCCAAGG | 52% |
| CXCR4-836 | AAAGCATAGAGGAGTTTTAGTACTCTGGAAA (SEQ ID | |
| | NO: 410) | |
| S. aureus | CACCGCTAGCTAATACGACTCACTATAGGGCTCCAA | 0% |
| CXCR4-836 + | GGAAAGCATAGAGGAGTTTTAGTACTCTGGAAA (SEQ | |
| GG | ID NO: 411) | |
| S. pyogenes | CACCGCTAGCTAATACGACTCACTATAGTCCCCTCCA | 48% |
| AAVS1_1 | CCCCACAGTGGTTTTAGAGCTAGAAATA (SEQ ID | |
| | NO: 412) | |
| S. pyogenes | CACCGCTAGCTAATACGACTCACTATAGGGTCCCCTC | 0% |
| AAVS1_1 + GG | CACCCCACAGTGGTTTTAGAGCTAGAAATA (SEQ ID | |
| | NO: 413) | |

### Example 20

### CRISPR/Cas9 RNP Supports Gene Editing and Gene Correction of Sickle Cell Disease patient T Lymphocytes

[2620] To determine whether Cas9 RNP mediated gene editing would correct the sickle cell disease (SCD) mutation, peripheral blood mononuclear cells (MNCs) from a SCD patient was obtained (Conversant Bio). To expand the T lymphocyte fraction from bulk MNCs, MNCs were thawed into T cell culture media (X-VIVO 15 supplemented with human AB serum, N-acetylcysteine, Glutamax (L-glutamine), and human cytokines (IL2, IL7, IL15). The T lymphocyte fraction was activated with CD3/CD28 immunomagnetic beads. By day 3 of MNC culture in T cell media, the cell population was 72% CD3⁺. After 7 days a population of >98% CD3⁺ T lymphocytes was obtained, most of which were also CD4⁺ (FIG. 51A). Genomic (g) DNA was extracted from patient CD3⁺ T lymphocytes and sequenced to confirm the presence of the SCD mutation.

[2621] After confirmation of the sickle mutation in the patient T lymphocytes, sgRNA was designed to target the SCD mutation (HBB-8-sickle gRNA targeting sequence: GUAACGGCAGACUUCUCCAC (SEQ ID NO:414), underline indicates SCD mutation). The gRNA was in vitro transcribed from DNA PCR product template. The HBB-8-sickle was modified to contain a 5′ ARCA cap and a 3′ polyA tail. Another gRNA HBB-15 (SEQ ID NO:397) was also in vitro transcribed and was modified to contain a 5′ ARCA cap and a 3′ polyA tail. The gRNAs were complexed to S. pyogenes Cas9 protein for RNP production.

[2622] To evaluate Cas RNP editing in SCD patient cells, 2 million cells were electroporated with D10A Cas9 RNP in which the protein was complex to 2 different gRNA pairs to target the sequence specific to the HBB gDNA of SCD patients (HBB-8-sickle (SEQ ID NO:414) and HBB-15 (SEQ ID NO:397)). Dual D10A nickase RNP (10 μg per million cells) was co-electroporated with a single strand oligonucleotide donor (SSODN, 250 pmoles per million cells). After electroporation, cells were plated into T cell media with or without CD3/CD28 immunomagnetic beads to determine whether restimulation of T cells after electroporation would improve survival and viability of gene edited cells. Re-plating the edited cells into culture with CD3/CD28 beads for cell reactivation improved the total viability of the electroporated cells in comparison to cells plated in T cell media without CD3/CD28 beads (% viability determined by flow cytometry analysis after staining with apoptosis stains 7-AAD and Annexin V; FIG. 51B). Gene editing was evaluated by DNA sequencing. The gRNA combination HBB-8-sickle (SEQ ID NO:414) and HBB-15 (SEQ ID NO:397) (each complexed to D10A Cas9 protein) supported 48% total editing, as detected by T7E1 endonuclease assay analysis of the HBB PCR product (FIG. 51C). Ten percent higher editing was detected in gDNA from the T lymphocytes that were reactivated with CD3/CD28 beads after electroporation, compared to cells cultured in T cell medial alone. These data show that Cas9 RNP targeting the SCD mutation supports gene editing in SCD patient cells.

### INCORPORATION BY REFERENCE

[2623] All publications, patents, and patent applications mentioned herein are hereby incorporated by reference in their entirety as if each individual publication, patent or patent application was specifically and individually indicated to be incorporated by reference. In case of conflict, the present application, including any definitions herein, will control.

### EQUIVALENTS

[2624] Those skilled in the art will recognize, or be able to ascertain using no more than routine experimentation, many equivalents to the specific embodiments of the invention described herein. Such equivalents are intended to be encompassed by the following claims. Other embodiments are also within the following claims.

What is claimed is:

1. A gRNA molecule comprising a targeting domain which is complementary with a target domain from a gene expressed in a eukaryotic cell, wherein the gRNA molecule is modified at its 5′ end and comprises a 3′ polyA tail.

2. The gRNA molecule of claim 1, wherein the gRNA molecule lacks a 5′ triphosphate group.

3. The gRNA molecule of claim 2, wherein the 5′ end of the targeting domain lacks a 5′ triphosphate group.

4. The gRNA molecule of claim 1, wherein the gRNA molecule includes a 5′ cap.

5. The gRNA molecule of claim 4, wherein the 5′ end of the targeting domain includes a 5′ cap.

6. The gRNA molecule of claim 4, wherein the 5′ cap comprises a modified guanine nucleotide that is linked to the remainder of the gRNA molecule via a 5′-5′ triphosphate linkage.

7. The gRNA molecule of claim 5, wherein the 5′ cap comprises a modified guanine nucleotide that is linked to the remainder of the gRNA molecule via a 5′-5′ triphosphate linkage.

8. The gRNA molecule of claim 4 or 5, wherein the 5′ cap comprises two optionally modified guanine nucleotides that are linked via an optionally modified 5′-5′ triphosphate linkage.

9. The gRNA molecule of claim 8, wherein the 5′ end of the gRNA molecule has the chemical formula: [chemical structure]
wherein:
each of B¹ and B^{1′} is independently [chemical structure]
each R¹ is independently C₁₋₄ alkyl, optionally substituted by a phenyl or a 6-membered heteroaryl;
each of R², R^{2′}, and R^{3′} is independently H, F, OH, or O—C₁₋₄ alkyl;
each of X, Y, and Z is independently O or S; and
each of X′ and Y′ is independently O or CH₂.

10. The gRNA molecule of claim 9, wherein each R¹ is independently —CH₃, —CH₂CH₃, or —CH₂C₆H₅.

11. The gRNA molecule of claim 9 or 10, wherein R¹ is —CH₃.

12. The gRNA molecule of any one of claims 9-11, wherein B^{1′} is

[chemical structure]

13. The gRNA molecule of any one of claims 9-12, wherein each of R², R^{2′}, and R^{3′} is independently H, OH, or O—CH₃.

14. The gRNA molecule of any one of claims 9-13, wherein each of X, Y, and Z is O.

15. The gRNA molecule of any one of claims 9-14, wherein X′ and Y′ are O.

16. The gRNA molecule of any one of claims 9-15, wherein the 5′ end of the gRNA molecule has the chemical formula:

[chemical structure]

17. The gRNA molecule of any one of claims 9-15, wherein the 5′ end of the gRNA molecule has the chemical formula:

[chemical structure]

18. The gRNA molecule of any one of claims 9-15, wherein the 5′ end of the gRNA molecule has the chemical formula:

[chemical structure]

19. The gRNA molecule of any one of claims 9-15, wherein the 5′ end of the gRNA molecule has the chemical formula:

[chemical structure]

20. The gRNA molecule of any one of claims 1-19, wherein the polyA tail is comprised of between 5 and 50 adenine nucleotides.

21. The gRNA molecule of any one of claims 1-19, wherein the polyA tail is comprised of between 5 and 40 adenine nucleotides.

22. The gRNA molecule of any one of claims 1-19, wherein the polyA tail is comprised of between 5 and 30 adenine nucleotides.

23. The gRNA molecule of any one of claims 1-19, wherein the polyA tail is comprised of between 10 and 50 adenine nucleotides.

24. The gRNA molecule of any one of claims 1-19, wherein the polyA tail is comprised of between 15 and 25 adenine nucleotides.

25. The gRNA molecule of any one of claims 1-19, wherein the polyA tail is comprised of about 20 adenine nucleotides.

26. The gRNA molecule of any one of claims 1-19, wherein the polyA tail is comprised of fewer than 30 adenine nucleotides.

27. The gRNA molecule of any one of claims 1-19, wherein the polyA tail is comprised of fewer than 25 adenine nucleotides.

28. The gRNA molecule of any one of claims 1-27, wherein the gRNA molecule was prepared by adding a polyA tail to a gRNA molecule precursor using a polyadenosine polymerase following in vitro transcription of the gRNA molecule precursor.

29. The gRNA molecule of any one of claims 1-27, wherein the gRNA molecule was prepared by ligating a polyA oligonucleotide to a gRNA molecule precursor following in vitro transcription using an RNA ligase or a DNA ligase with or without a splinted DNA oligonucleotide complementary to the gRNA molecule precursor and the polyA oligonucleotide.

30. The gRNA molecule of any one of claims 1-27, wherein the gRNA molecule including the polyA tail was prepared by in vitro transcription from a DNA template.

31. The gRNA molecule of any one of claims 1-27, wherein the gRNA molecule including the polyA tail was prepared synthetically, in one or several pieces that were ligated together by either an RNA ligase or a DNA ligase with or without one or more splinted DNA oligonucleotides.

32. The gRNA molecule of any one of claims 1-31, wherein the gRNA molecule contains one or more nucleotides which stabilize the gRNA molecule against nuclease degradation.

33. The gRNA molecule of any one of claims 1-32, wherein the gRNA molecule contains one or more modified uridines.

34. The gRNA molecule of any one of claims 1-33, wherein the gRNA molecule contains one or more modified adenosines.

35. The gRNA molecule of any one of claims 1-34, wherein the gRNA molecule contains one or more modified cytidines.

36. The gRNA molecule of any one of claims 1-35, wherein the gRNA molecule contains one or more modified guanosines.

37. The gRNA molecule of any one of claims 1-36, wherein one or more sugar-modified ribonucleotides are incorporated into the gRNA molecule.

38. The gRNA molecule of any one of claims 1-37, wherein the phosphate backbone is modified.

39. The gRNA molecule of claim 38, wherein the phosphate backbone is modified with a phosphothioate group.

40. The gRNA molecule of any one of claims 1-39, wherein the gRNA molecule comprises a locked nucleic acid (LNA) in which a 2′ OH-group is connected to the 4′ carbon of the same ribose sugar.

41. The gRNA molecule of any one of claims 1-40, wherein the gRNA molecule comprises a multicyclic nucleotide.

42. The gRNA molecule of any one of claims 1-41, wherein the gRNA molecule comprises one or more modified nucleotides where the ribose oxygen is replaced with sulfur (S), selenium (Se), or alkylene.

43. The gRNA molecule of any one of claims 1-42, wherein the gRNA molecule comprises one or more modified nucleotides with a double bond in the ribose structure.

44. The gRNA molecule of any one of claims 1-43, wherein the gRNA molecule comprises one or more modified nucleotides with a ring contraction of ribose or ring expansion of ribose.

45. The gRNA molecule of any one of claims 1-44, wherein the gRNA molecule comprises a 4′-S, 4′-Se or a 4′-C-aminomethyl-2′-O-Me modification.

46. The gRNA molecule of any one of claims 1-45, wherein the gRNA is a modular gRNA molecule.

47. The gRNA molecule of any one of claims 1-45, wherein the gRNA is a chimeric gRNA molecule.

48. The gRNA molecule of any one of claims 1-47, wherein the targeting domain is 16 nucleotides or more in length.

49. The gRNA molecule of any one of claims 1-48, comprising from 5′ to 3′:
a targeting domain;
a first complementarity domain;
a linking domain;
a second complementarity domain;
a proximal domain; and
a tail domain.

50. The gRNA molecule of any one of claims 1-49, comprising:
a linking domain of no more than 25 nucleotides in length;
a proximal and tail domain, that taken together, are at least 20 nucleotides in length; and
a targeting domain of equal to or greater than 16, 17, 18, 19, 20, 21, 22, 23, 24, 25 or 26 nucleotides in length.

51. The gRNA molecule of any one of claims 1-50, wherein the modification or modifications cause the gRNA to exhibit increased stability towards nucleases when introduced into a eukaryotic cell.

52. The gRNA molecule of any one of claims 1-51, wherein the targeting domain is complementary with a target domain from the FAS, BID, CTLA4, PDCD1, CBLB, PTPN6, TRAC or TRBC gene.

53. The gRNA molecule of claim 52, wherein the targeting domain is configured to target the promoter region of the FAS, BID, CTLA4, PDCD1, CBLB, PTPN6, TRAC or TRBC gene.

54. The gRNA molecule of any one of claims 1-51, wherein the targeting domain is complementary with a target domain from the CCR5 gene.

55. The gRNA molecule of claim 54, wherein said targeting domain is configured to target the coding region of the CCR5 gene.

56. The gRNA molecule of claim 54, wherein said targeting domain is configured to target the non-coding region of the CCR5 gene.

57. The gRNA molecule of claim 54, wherein said targeting domain is configured to target an intron or exon of the CCR5 gene.

58. The gRNA molecule of any one of claims 1-51, wherein the targeting domain is complementary with a target domain from the HBB or BCL11A gene.

59. The gRNA molecule of claim 58, wherein the targeting domain is configured to target the promoter region of the BCL11A gene.

60. The gRNA molecule of any one of claims 1-51, wherein the targeting domain is complementary with a target domain from the CXCR4 gene.

61. The gRNA molecule of claim 60, wherein the targeting domain is configured to target the promoter region of the CXCR4 gene.

62. A gRNA molecule comprising a targeting domain which is complementary with a target domain from a gene expressed in a eukaryotic cell, wherein the gRNA molecule comprises a 3′ polyA tail which is comprised of fewer than 30 adenine nucleotides.

63. The gRNA molecule of claim 62, wherein the polyA tail is comprised of fewer than 25 adenine nucleotides.

64. The gRNA molecule of claim 62, wherein the polyA tail is comprised of between 15 and 25 adenine nucleotides.

65. The gRNA molecule of claim 62, wherein the polyA tail is comprised of about 20 adenine nucleotides.

66. The gRNA molecule of any one of claims 62-65, wherein the gRNA molecule is modified at its 5′ end.

67. The gRNA molecule of claim 66, wherein the gRNA molecule lacks a 5′ triphosphate group.

68. The gRNA molecule of claim 67, wherein the gRNA molecule comprises a targeting domain and the 5′ end of the targeting domain lacks a 5′ triphosphate group.

69. The gRNA molecule of claim 66, wherein the gRNA molecule includes a 5′ cap.

70. The gRNA molecule of claim 69, wherein the gRNA molecule comprises a targeting domain and the 5′ end of the targeting domain includes a 5′ cap.

71. The gRNA molecule of claim 69 or 70, wherein the 5′ cap comprises two optionally modified guanine nucleotides that are linked via an optionally modified 5′-5′ triphosphate linkage.

72. The gRNA molecule of any one of claims 69-71, wherein the 5′ cap comprises two optionally modified guanine nucleotides that are linked via a 5′-5′ triphosphate linkage.

73. The gRNA molecule of any one of claims 69-72, wherein the 5′ end of the gRNA molecule has the chemical formula: [chemical structure]
wherein:
each of B¹ and B^{1′} is independently [chemical structure]
each R¹ is independently C₁₋₄ alkyl, optionally substituted by a phenyl or a 6-membered heteroaryl;
each of R², R^{2′}, and R^{3′} is independently H, F, OH, or O—C₁₋₄ alkyl;
each of X, Y, and Z is independently O or S; and
each of X′ and Y′ is independently O or CH₂.

74. The gRNA molecule of claim 73, wherein each R¹ is independently —CH₃, —CH₂CH₃, or —CH₂C₆H₅.

75. The gRNA molecule of claim 73 or 74, wherein R¹ is —CH₃.

76. The gRNA molecule of any one of claims 73-75, wherein B^{1′} is

[chemical structure]

77. The gRNA molecule of any one of claims 73-76, wherein each of R², R^{2′}, and R^{3′} is independently H, OH, or O—CH₃.

78. The gRNA molecule of any one of claims 73-77, wherein each of X, Y, and Z is O.

79. The gRNA molecule of any one of claims 73-78, wherein X′ and Y′ are O.

80. The gRNA molecule of any one of claims 73-79, wherein the 5′ end of the gRNA molecule has the chemical formula:

[chemical structure]

81. The gRNA molecule of any one of claims 73-79, wherein the 5′ end of the gRNA molecule has the chemical formula:

[chemical structure]

82. The gRNA molecule of any one of claims 73-79, wherein the 5′ end of the gRNA molecule has the chemical formula:

[chemical structure]

83. The gRNA molecule of any one of claims 73-79, wherein the 5′ end of the gRNA molecule has the chemical formula:

[chemical structure]

84. The gRNA molecule of any one of claims 1-83, wherein the gRNA molecule was prepared by adding a polyA tail to a gRNA molecule precursor using a polyadenosine polymerase following in vitro transcription of the gRNA molecule precursor.

85. The gRNA molecule of any one of claims 62-83, wherein the gRNA molecule was prepared by ligating a polyA oligonucleotide to a gRNA molecule precursor following in vitro transcription using an RNA ligase or a DNA ligase with or without a splinted DNA oligonucleotide complementary to the gRNA molecule precursor and the polyA oligonucleotide.

86. The gRNA molecule of any one of claims 62-83, wherein the gRNA molecule including the polyA tail was prepared by in vitro transcription from a DNA template.

87. The gRNA molecule of any one of claims 62-83, wherein the gRNA molecule including the polyA tail was prepared synthetically, in one or several pieces that were ligated together by either an RNA ligase or a DNA ligase with or without one or more splinted DNA oligonucleotides.

88. The gRNA molecule of any one of claims 62-83, wherein the gRNA molecule contains one or more nucleotides which stabilize the gRNA molecule against nuclease degradation.

89. The gRNA molecule of any one of claims 62-88, wherein the gRNA molecule contains one or more modified uridines.

90. The gRNA molecule of any one of claims 62-89, wherein the gRNA molecule contains one or more modified adenosines.

91. The gRNA molecule of any one of claims 62-90, wherein the gRNA molecule contains one or more modified cytidines.

92. The gRNA molecule of any one of claims 62-91, wherein the gRNA molecule contains one or more modified guanosines.

93. The gRNA molecule of any one of claims 62-92, wherein one or more sugar-modified ribonucleotides are incorporated into the gRNA molecule.

94. The gRNA molecule of any one of claims 62-93, wherein the phosphate backbone is modified.

95. The gRNA molecule of claim 94, wherein the phosphate backbone is modified with a phosphothioate group.

96. The gRNA molecule of any one of claims 62-95, wherein the gRNA molecule comprises a locked nucleic acid (LNA) in which a 2′ OH-group is connected to the 4′ carbon of the same ribose sugar.

97. The gRNA molecule of any one of claims 62-96, wherein the gRNA molecule comprises a multicyclic nucleotide.

98. The gRNA molecule of any one of claims 62-97, wherein the gRNA molecule comprises one or more modified nucleotides where the ribose oxygen is replaced with sulfur (S), selenium (Se), or alkylene.

99. The gRNA molecule of any one of claims 62-98, wherein the gRNA molecule comprises one or more modified nucleotides with a double bond in the ribose structure.

100. The gRNA molecule of any one of claims 62-99, wherein the gRNA molecule comprises one or more modified nucleotides with a ring contraction of ribose or ring expansion of ribose.

101. The gRNA molecule of any one of claims 62-100, wherein the gRNA molecule comprises a 4′-S, 4′-Se or a 4′-C-aminomethyl-2′-O-Me modification.

102. The gRNA molecule of any one of claims 62-101, wherein the gRNA is a modular gRNA molecule.

103. The gRNA molecule of any one of claims 62-101, wherein the gRNA is a chimeric gRNA molecule.

104. The gRNA molecule of any one of claims 62-103, wherein the targeting domain is 16 nucleotides or more in length.

105. The gRNA molecule of any one of claims 62-104, comprising from 5′ to 3′:
a targeting domain;
a first complementarity domain;
a linking domain;
a second complementarity domain;
a proximal domain; and
a tail domain.

106. The gRNA molecule of any one of claims 62-105, comprising:
a linking domain of no more than 25 nucleotides in length;
a proximal and tail domain, that taken together, are at least 20 nucleotides in length; and
a targeting domain of equal to or greater than 16, 17, 18, 19, 20, 21, 22, 23, 24, 25 or 26 nucleotides in length.

107. The gRNA molecule of any one of claims 62-106, wherein the modification or modifications cause the gRNA to exhibit increased stability towards nucleases when introduced into a eukaryotic cell.

108. The gRNA molecule of any one of claims 62-107, wherein the targeting domain is complementary with a target domain from the FAS, BID, CTLA4, PDCD1, CBLB, PTPN6, TRAC or TRBC gene.

109. The gRNA molecule of claim 108, wherein the targeting domain is configured to target the promoter region of the FAS, BID, CTLA4, PDCD1, CBLB, PTPN6, TRAC or TRBC gene.

110. The gRNA molecule of any one of claims 62-107, wherein the targeting domain is complementary with a target domain from the CCR5 gene.

111. The gRNA molecule of claim 110, wherein said targeting domain is configured to target the coding region of the CCR5 gene.

112. The gRNA molecule of claim 110, wherein said targeting domain is configured to target the non-coding region of the CCR5 gene.

113. The gRNA molecule of claim 110, wherein said targeting domain is configured to target an intron or exon of the CCR5 gene.

114. The gRNA molecule of any one of claims 62-107, wherein the targeting domain is complementary with a target domain from the HBB or BCL11A gene.

115. The gRNA molecule of claim 114, wherein the targeting domain is configured to target the promoter region of the BCL11A gene.

116. The gRNA molecule of any one of claims 62-107, wherein the targeting domain is complementary with a target domain from the CXCR4 gene.

117. The gRNA molecule of claim 116, wherein the targeting domain is configured to target the promoter region of the CXCR4 gene.

118. A composition comprising the gRNA molecule of any one of claims 1-117 complexed with a Cas9 molecule.

119. A composition comprising the gRNA molecule of any one of claims 1-117 and a nucleic acid encoding a Cas9 molecule.

120. The composition of claim 118 or 119, wherein the Cas9 molecule is an eaCas9 molecule.

121. The composition of claim 120, wherein the eaCas9 molecule is a nickase molecule.

122. The composition of claim 118 or 119, wherein the Cas9 molecule is an eiCas9 molecule.

123. The composition of claim 118 or 119, wherein the Cas9 molecule is an eiCas9-fusion protein molecule.

124. The composition of any one of claims 118-123, further comprising a second gRNA molecule of any one of claims 1-117 comprising a targeting domain which is complementary to a second target domain of the gene.

125. A composition comprising at least two gRNA molecules of any one of claims 1-117 to target two or more genes that are expressed in a eukaryotic cell.

126. The composition of claim 125, further comprising a Cas9 molecule as defined in any one of claims 120-123.

127. The composition of claim 125, further comprising a nucleic acid encoding a Cas9 molecule as defined in any one of claims 120-123.

128. A gRNA molecule of any one of claims 1-117 for use as a medicament.

129. A composition of any one of claims 118-127 for use as a medicament.

130. A composition of any one of claims 118-127 for use in editing or modulating expression of a gene in a eukaryotic cell.

131. A method of editing or modulating expression of a gene in a eukaryotic cell from a subject, the method comprising contacting the cell with a composition of any one of claims 118-127.

132. The method of claim 131, wherein the cell is contacted with the composition ex vivo.

133. The method of claim 132, further comprising returning the contacted cell to the subject.

134. The composition of claim 130 or the method of any one of claims 131-133, wherein the cell is a circulating cell from a subject suffering from cancer.

135. The composition of claim 130 or the method of any one of claims 131-133, wherein the gene is the FAS, BID, CTLA4, PDCD1, CBLB, PTPN6, TRAC or TRBC gene and the cell is a circulating cell from a subject who could benefit from a mutation at a T cell target position of the FAS, BID, CTLA4, PDCD1, CBLB, PTPN6, TRAC or TRBC gene.

136. The composition or method of claim 134 or 135, wherein the cell is a T cell.

137. The composition or method of claim 134 or 135, wherein the cell is an engineered T cell.

138. The composition or method of claim 134 or 135, wherein the cell is an engineered chimeric antigen receptor (CAR) T cell.

139. The composition or method of claim 134 or 135, wherein the cell is an engineered T-cell receptor (TCR) T cell.

140. The composition or method of claim 134 or 135, wherein the cell is a T cell and the T cell is engineered to express a TCR or a CAR prior to introducing a T cell target position mutation in one or more of the FAS, BID, CTLA4, PDCD1, CBLB, PTPN6, TRAC or TRBC genes.

141. The composition or method of claim 140, wherein the T cell is engineered to express a TCR or a CAR after introducing a T cell target position mutation in one or more of the FAS, BID, CTLA4, PDCD1, CBLB, PTPN6, TRAC or TRBC genes.

142. The composition or method of claim 140, wherein the cell is a T cell and the T cell is is engineered to express a TCR or a CAR at the same time as introducing a T cell target position mutation in one or more of the FAS, BID, CTLA4, PDCD1, CBLB, PTPN6, TRAC or TRBC genes.

143. The composition of claim 130 or the method of any one of claims 131-133, wherein the cell is from a subject suffering from or at risk for HIV infection or AIDS.

144. The composition of claim 130 or the method of any one of claims 131-133, wherein the gene is the CCR5 gene and the cell is from a subject suffering from or at risk for HIV infection or AIDS who has a wild type sequence at a CCR5 target position of the CCR5 gene.

145. The composition of claim 130 or the method of any one of claims 131-133, wherein the gene is the CXCR4 gene and the cell is from a subject suffering from or at risk for HIV infection or AIDS who has a wild type sequence at a CXCR4 target position of the CXCR4 gene.

146. The composition or method of any one of claims 143-145, wherein the cell is a blood cell.

147. The composition or method of any one of claims 143-145, wherein the cell is a CD4+ cell.

148. The composition or method of any one of claims 143-145, wherein the cell is a stem cell.

149. The composition of claim 130 or the method of any one of claims 131-133, wherein the cell is from a subject suffering from SCD.

150. The composition of claim 130 or the method of any one of claims 131-133, wherein the gene is the HBB gene or the the BCL11A gene and the cell is from a subject having a mutation at an SCD target position in the HBB gene or from a subject who would benefit from having a mutation at an SCD target position in the BCL11A gene.

151. The composition or method of claim 149 or 150, wherein the cell is an erythroid cell.

152. The composition or method of claim 149 or 150, wherein the cell is a bone marrow cell.

153. The composition or method of claim 149 or 150, wherein the cell is a stem cell.

154. The composition of claim 130 or the method of any one of claims 131-133, wherein the cell is from a subject suffering from BT.

155. The composition of claim 130 or the method of any one of claims 131-133, wherein the gene is the BCL11A gene and the cell is from a subject who could benefit from a mutation at a BT target position of the BCL11A gene.

156. The composition or method of claim 154 or 155, wherein the cell is an erythroid cell.

157. The composition or method of claim 154 or 155, wherein the cell is an erythroid cell precursor cell.

158. The composition or method of claim 154 or 155, wherein said erythorid cell precursor cell is a hematopoietic stem cell.

The application's sequence listing, which the Patent Office published only in electronic form, follows.

SEQUENCE LISTING (488 sequences)

SEQ ID NO: 1 - protein, 1344 aa, Streptococcus mutans
KKPYSIGLDIGTNSVGWAVVTDDYKVPAKKMKVLGNTDKSHIEKNLLGALLFDSGNTAEDRRLKRTARRRYTRRRNRILYLQEIFSEEMGKVDDSFFHRLEDSFLVTEDKRGERHPIFGNLEEEVKYHENFPTIYHLRQYLADNPEKVDLRLVYLALAHIIKFRGHFLIEGKFDTRNNDVQRLFQEFLAVYDNTFENSSLQEQNVQVEEILTDKISKSAKKDRVLKLFPNEKSNGRFAEFLKLIVGNQADFKKHFELEEKAPLQFSKDTYEEELEVLLAQIGDNYAELFLSAKKLYDSILLSGILTVTDVGTKAPLSASMIQRYNEHQMDLAQLKQFIRQKLSDKYNEVFSDVSKDGYAGYIDGKTNQEAFYKYLKGLLNKIEGSGYFLDKIEREDFLRKQRTFDNGSIPHQIHLQEMRAIIRRQAEFYPFLADNQDRIEKLLTFRIPYYVGPLARGKSDFAWLSRKSADKITPWNFDEIVDKESSAEAFINRMTNYDLYLPNQKVLPKHSLLYEKFTVYNELTKVKYKTEQGKTAFFDANMKQEIFDGVFKVYRKVTKDKLMDFLEKEFDEFRIVDLTGLDKENKVFNASYGTYHDLCKILDKDFLDNSKNEKILEDIVLTLTLFEDREMIRKRLENYSDLLTKEQVKKLERRHYTGWGRLSAELIHGIRNKESRKTILDYLIDDGNSNRNFMQLINDDALSFKEEIAKAQVIGETDNLNQVVSDIAGSPAIKKGILQSLKIVDELVKIMGHQPENIVVEMARENQFTNQGRRNSQQRLKGLTDSIKEFGSQILKEHPVENSQLQNDRLFLYYLQNGRDMYTGEELDIDYLSQYDIDHIIPQAFIKDNSIDNRVLTSSKENRGKSDDVPSKDVVRKMKSYWSKLLSAKLITQRKFDNLTKAERGGLTDDDKAGFIKRQLVETRQITKHVARILDERFNTETDENNKKIRQVKIVTLKSNLVSNFRKEFELYKVREINDYHHAHDAYLNAVIGKALLGVYPQLEPEFVYGDYPHFHGHKENKATAKKFFYSNIMNFFKKDDVRTDKNGEIIWKKDEHISNIKKVLSYPQVNIVKKVEEQTGGFSKESILPKGNSDKLIPRKTKKFYWDTKKYGGFDSPIVAYSILVIADIEKGKSKKLKTVKALVGVTIMEKMTFERDPVAFLERKGYRNVQEENIIKLPKYSLFKLENGRKRLLASARELQKGNEIVLPNHLGTLLYHAKNIHKVDEPKHLDYVDKHKDEFKELLDVVSNFSKKYTLAEGNLEKIKELYAQNNGEDLKELASSFINLLTFTAIGAPATFKFFDKNIDRKRYTSTTEILNATLIHQSITGLYETRIDLNKLGGD

SEQ ID NO: 2 - protein, 1367 aa, Streptococcus pyogenes
DKKYSIGLDIGTNSVGWAVITDEYKVPSKKFKVLGNTDRHSIKKNLIGALLFDSGETAEATRLKRTARRRYTRRKNRICYLQEIFSNEMAKVDDSFFHRLEESFLVEEDKKHERHPIFGNIVDEVAYHEKYPTIYHLRKKLVDSTDKADLRLIYLALAHMIKFRGHFLIEGDLNPDNSDVDKLFIQLVQTYNQLFEENPINASGVDAKAILSARLSKSRRLENLIAQLPGEKKNGLFGNLIALSLGLTPNFKSNFDLAEDAKLQLSKDTYDDDLDNLLAQIGDQYADLFLAAKNLSDAILLSDILRVNTEITKAPLSASMIKRYDEHHQDLTLLKALVRQQLPEKYKEIFFDQSKNGYAGYIDGGASQEEFYKFIKPILEKMDGTEELLVKLNREDLLRKQRTFDNGSIPHQIHLGELHAILRRQEDFYPFLKDNREKIEKILTFRIPYYVGPLARGNSRFAWMTRKSEETITPWNFEEVVDKGASAQSFIERMTNFDKNLPNEKVLPKHSLLYEYFTVYNELTKVKYVTEGMRKPAFLSGEQKKAIVDLLFKTNRKVTVKQLKEDYFKKIECFDSVEISGVEDRFNASLGTYHDLLKIIKDKDFLDNEENEDILEDIVLTLTLFEDREMIEERLKTYAHLFDDKVMKQLKRRRYTGWGRLSRKLINGIRDKQSGKTILDFLKSDGFANRNFMQLIHDDSLTFKEDIQKAQVSGQGDSLHEHIANLAGSPAIKKGILQTVKVVDELVKVMGRHKPENIVIEMARENQTTQKGQKNSRERMKRIEEGIKELGSQILKEHPVENTQLQNEKLYLYYLQNGRDMYVDQELDINRLSDYDVDHIVPQSFLKDDSIDNKVLTRSDKNRGKSDNVPSEEVVKKMKNYWRQLLNAKLITQRKFDNLTKAERGGLSELDKAGFIKRQLVETRQITKHVAQILDSRMNTKYDENDKLIREVKVITLKSKLVSDFRKDFQFYKVREINNYHHAHDAYLNAVVGTALIKKYPKLESEFVYGDYKVYDVRKMIAKSEQEIGKATAKYFFYSNIMNFFKTEITLANGEIRKRPLIETNGETGEIVWDKGRDFATVRKVLSMPQVNIVKKTEVQTGGFSKESILPKRNSDKLIARKKDWDPKKYGGFDSPTVAYSVLVVAKVEKGKSKKLKSVKELLGITIMERSSFEKNPIDFLEAKGYKEVKKDLIIKLPKYSLFELENGRKRMLASAGELQKGNELALPSKYVNFLYLASHYEKLKGSPEDNEQKQLFVEQHKHYLDEIIEQISEFSKRVILADANLDKVLSAYNKHRDKPIREQAENIIHLFTLTNLGAPAAFKYFDTTIDRKRYTSTKEVLDATLIHQSITGLYETRIDLSQLGGD

SEQ ID NO: 3 - protein, 1387 aa, Streptococcus thermophilus
TKPYSIGLDIGTNSVGWAVTTDNYKVPSKKMKVLGNTSKKYIKKNLLGVLLFDSGITAEGRRLKRTARRRYTRRRNRILYLQEIFSTEMATLDDAFFQRLDDSFLVPDDKRDSKYPIFGNLVEEKAYHDEFPTIYHLRKYLADSTKKADLRLVYLALAHMIKYRGHFLIEGEFNSKNNDIQKNFQDFLDTYNAIFESDLSLENSKQLEEIVKDKISKLEKKDRILKLFPGEKNSGIFSEFLKLIVGNQADFRKCFNLDEKASLHFSKESYDEDLETLLGYIGDDYSDVFLKAKKLYDAILLSGFLTVTDNETEAPLSSAMIKRYNEHKEDLALLKEYIRNISLKTYNEVFKDDTKNGYAGYIDGKTNQEDFYVYLKKLLAEFEGADYFLEKIDREDFLRKQRTFDNGSIPYQIHLQEMRAILDKQAKFYPFLAKNKERIEKILTFRIPYYVGPLARGNSDFAWSIRKRNEKITPWNFEDVIDKESSAEAFINRMTSFDLYLPEEKVLPKHSLLYETFNVYNELTKVRFIAESMRDYQFLDSKQKKDIVRLYFKDKRKVTDKDIIEYLHAIYGYDGIELKGIEKQFNSSLSTYHDLLNIINDKEFLDDSSNEAIIEEIIHTLTIFEDREMIKQRLSKFENIFDKSVLKKLSRRHYTGWGKLSAKLINGIRDEKSGNTILDYLIDDGISNRNFMQLIHDDALSFKKKIQKAQIIGDEDKGNIKEVVKSLPGSPAIKKGILQSIKIVDELVKVMGGRKPESIVVEMARENQYTNQGKSNSQQRLKRLEKSLKELGSKILKENIPAKLSKIDNNALQNDRLYLYYLQNGKDMYTGDDLDIDRLSNYDIDHIIPQAFLKDNSIDNKVLVSSASNRGKSDDVPSLEVVKKRKTFWYQLLKSKLISQRKFDNLTKAERGGLSPEDKAGFIQRQLVETRQITKHVARLLDEKFNNKKDENNRAVRTVKIITLKSTLVSQFRKDFELYKVREINDFHHAHDAYLNAVVASALLKKYPKLEPEFVYGDYPKYNSFRERKSATEKVYFYSNIMNIFKKSISLADGRVIERPLIEVNEETGESVWNKESDLATVRRVLSYPQVNVVKKVEEQNHGLDRGKPKGLFNANLSSKPKPNSNENLVGAKEYLDPKKYGGYAGISNSFTVLVKGTIEKGAKKKITNVLEFQGISILDRINYRKDKLNFLLEKGYKDIELIIELPKYSLFELSDGSRRMLASILSTNNKRGEIHKGNQIFLSQKFVKLLYHAKRISNTINENHRKYVENHKKEFEELFYYILEFNENYVGAKKNGKLLNSAFQSWQNHSIDELCSSFIGPTGSERKGLFELTSRGSAADFEFLGVKIPRYRDYTPSSLLKDATLIHQSVTGLYETRIDLAKLGEG

SEQ ID NO: 4 - protein, 1333 aa, Listeria innocua
KKPYTIGLDIGTNSVGWAVLTDQYDLVKRKMKIAGDSEKKQIKKNFWGVRLFDEGQTAADRRMARTARRRIERRRNRISYLQGIFAEEMSKTDANFFCRLSDSFYVDNEKRNSRHPFFATIEEEVEYHKNYPTIYHLREELVNSSEKADLRLVYLALAHIIKYRGNFLIEGALDTQNTSVDGIYKQFIQTYNQVFASGIEDGSLKKLEDNKDVAKILVEKVTRKEKLERILKLYPGEKSAGMFAQFISLIVGSKGNFQKPFDLIEKSDIECAKDSYEEDLESLLALIGDEYAELFVAAKNAYSAVVLSSIITVAETETNAKLSASMIERFDTHEEDLGELKAFIKLHLPKHYEEIFSNTEKHGYAGYIDGKTKQADFYKYMKMTLENIEGADYFIAKIEKENFLRKQRTFDNGAIPHQLHLEELEAILHQQAKYYPFLKENYDKIKSLVTFRIPYFVGPLANGQSEFAWLTRKADGEIRPWNIEEKVDFGKSAVDFIEKMTNKDTYLPKENVLPKHSLCYQKYLVYNELTKVRYINDQGKTSYFSGQEKEQIFNDLFKQKRKVKKKDLELFLRNMSHVESPTIEGLEDSFNSSYSTYHDLLKVGIKQEILDNPVNTEMLENIVKILTVFEDKRMIKEQLQQFSDVLDGVVLKKLERRHYTGWGRLSAKLLMGIRDKQSHLTILDYLMNDDGLNRNLMQLINDSNLSFKSIIEKEQVTTADKDIQSIVADLAGSPAIKKGILQSLKIVDELVSVMGYPPQTIVVEMARENQTTGKGKNNSRPRYKSLEKAIKEFGSQILKEHPTDNQELRNNRLYLYYLQNGKDMYTGQDLDIHNLSNYDIDHIVPQSFITDNSIDNLVLTSSAGNREKGDDVPPLEIVRKRKVFWEKLYQGNLMSKRKFDYLTKAERGGLTEADKARFIHRQLVETRQITKNVANILHQRFNYEKDDHGNTMKQVRIVTLKSALVSQFRKQFQLYKVRDVNDYHHAHDAYLNGVVANTLLKVYPQLEPEFVYGDYHQFDWFKANKATAKKQFYTNIMLFFAQKDRIIDENGEILWDKKYLDTVKKVMSYRQMNIVKKTEIQKGEFSKATIKPKGNSSKLIPRKTNWDPMKYGGLDSPNMAYAVVIEYAKGKNKLVFEKKIIRVTIMERKAFEKDEKAFLEEQGYRQPKVLAKLPKYTLYECEEGRRRMLASANEAQKGNQQVLPNHLVTLLHHAANCEVSDGKSLDYIESNREMFAELLAHVSEFAKRYTLAEANLNKINQLFEQNKEGDIKAIAQSFVDLMAFNAMGAPASFKFFETTIERKRYNNLKELLNSTIIYQSITGLYESRKRLDD

SEQ ID NO: 5 - RNA, 96 nt, Artificial Sequence
  Synthetic oligonucleotide
  modified_base (1)..(20): a, c, u, g, unknown or other
  misc_feature (1)..(20): n is a, c, g, or u
nnnnnnnnnnnnnnnnnnnnguuuuagagcuagaaauagcaaguuaaaauaaggcuaguccguuaucaacuugaaaaaguggcaccgagucggugc

SEQ ID NO: 6 - protein, 1082 aa, Neisseria meningitidis
MAAFKPNSINYILGLDIGIASVGWAMVEIDEEENPIRLIDLGVRVFERAEVPKTGDSLAMARRLARSVRRLTRRRAHRLLRTRRLLKREGVLQAANFDENGLIKSLPNTPWQLRAAALDRKLTPLEWSAVLLHLIKHRGYLSQRKNEGETADKELGALLKGVAGNAHALQTGDFRTPAELALNKFEKESGHIRNQRSDYSHTFSRKDLQAELILLFEKQKEFGNPHVSGGLKEGIETLLMTQRPALSGDAVQKMLGHCTFEPAEPKAAKNTYTAERFIWLTKLNNLRILEQGSERPLTDTERATLMDEPYRKSKLTYAQARKLLGLEDTAFFKGLRYGKDNAEASTLMEMKAYHAISRALEKEGLKDKKSPLNLSPELQDEIGTAFSLFKTDEDITGRLKDRIQPEILEALLKHISFDKFVQISLKALRRIVPLMEQGKRYDEACAEIYGDHYGKKNTEEKIYLPPIPADEIRNPVVLRALSQARKVINGVVRRYGSPARIHIETAREVGKSFKDRKEIEKRQEENRKDREKAAAKFREYFPNFVGEPKSKDILKLRLYEQQHGKCLYSGKEINLGRLNEKGYVEIDHALPFSRTWDDSFNNKVLVLGSENQNKGNQTPYEYFNGKDNSREWQEFKARVETSRFPRSKKQRILLQKFDEDGFKERNLNDTRYVNRFLCQFVADRMRLTGKGKKRVFASNGQITNLLRGFWGLRKVRAENDRHHALDAVVVACSTVAMQQKITRFVRYKEMNAFDGKTIDKETGEVLHQKTHFPQPWEFFAQEVMIRVFGKPDGKPEFEEADTLEKLRTLLAEKLSSRPEAVHEYVTPLFVSRAPNRKMSGQGHMETVKSAKRLDEGVSVLRVPLTQLKLKDLEKMVNREREPKLYEALKARLEAHKDDPAKAFAEPFYKYDKAGNRTQQVKAVRVEQVQKTGVWVRNHNGIADNATMVRVDVFEKGDKYYLVPIYSWQVAKGILPDRAVVQGKDEEDWQLIDDSFNFKFSLHPNDLVEVITKKARMFGYFASCHRGTGNINIRIHDLDHKIGKNGILEGIGVKTALSFQKYQIDELGKEIRPCRLKKRPPVR

SEQ ID NO: 7 - protein, 1368 aa, Streptococcus pyogenes [sequence omitted]

SEQ ID NO: 8 - protein, 12 aa, Artificial Sequence
  Synthetic peptide
  VARIANT (2)..(2): Xaa is Ile or "Val" or "Met" or "Leu" or "Thr"
  VARIANT (4)..(4): Xaa is Thr or "Ile" or "Val" or "Ser" or "Asn" or "Tyr" or "Glu" or "Leu"
  VARIANT (5)..(5): Xaa is Asn or "Ser" or "Gly" or "Ala" or "Asp" or "Thr" or "Arg" or "Met" or "Phe"
  VARIANT (6)..(6): Xaa is Ser or "Tyr" or "Asn" or "Phe"
  VARIANT (7)..(7): Xaa is Val or "Ile" or "Leu" or "Cys" or "Thr" or "Phe"
  VARIANT (9)..(9): Xaa is Trp or "Phe" or "Val" or "Tyr" or "Ser" or "Leu"
  VARIANT (10)..(10): Xaa is Ala or "Ser" or "Cys" or "Val" or "Gly"
  VARIANT (11)..(11): Xaa is Val or "Ile" or "Leu" or "Ala" or "Met" or "His"
  VARIANT (12)..(12): Xaa is any amino acid or absent
DXGXXXXGXXXX

SEQ ID NO: 9 - protein, 12 aa, Artificial Sequence
  Synthetic peptide
  VARIANT (2)..(2): Xaa is Ile or "Val" or "Met" or "Leu" or "Thr"
  VARIANT (4)..(4): Xaa is Thr or "Ile" or "Val" or "Ser" or "Asn" or "Tyr" or "Glu" or "Leu"
  VARIANT (5)..(5): Xaa is Asn or "Ser" or "Gly" or "Ala" or "Asp" or "Thr" or "Arg" or "Met" or "Phe"
  VARIANT (7)..(7): Xaa is Val or "Ile" or "Leu" or "Cys" or "Thr" or "Phe"
  VARIANT (9)..(9): Xaa is Trp or "Phe" or "Val" or "Tyr" or "Ser" or "Leu"
  VARIANT (10)..(10): Xaa is Ala or "Ser" or "Cys" or "Val" or "Gly"
  VARIANT (11)..(11): Xaa is Val or "Ile" or "Leu" or "Ala" or "Met" or "His"
  VARIANT (12)..(12): Xaa is any amino acid or absent
DXGXXSXGXXXX

SEQ ID NO: 10 - protein, 12 aa, Artificial Sequence
  Synthetic peptide
  VARIANT (4)..(4): Xaa is Thr or "Ile" or "Val" or "Ser" or "Asn" or "Tyr" or "Glu" or "Leu"
  VARIANT (5)..(5): Xaa is Asn or "Ser" or "Gly" or "Ala" or "Asp" or "Thr" or "Arg" or "Met" or "Phe"
  VARIANT (11)..(11): Xaa is Val or "Ile" or "Leu" or "Ala" or "Met" or "His"
  VARIANT (12)..(12): Xaa is any amino acid or absent
DIGXXSVGWAXX

SEQ ID NO: 11 - protein, 12 aa, Artificial Sequence
  Synthetic peptide
  VARIANT (12)..(12): Any non-polar alkyl amino acid or a hydroxyl amino acid
DIGTNSVGWAVX

SEQ ID NO: 12 - protein, 8 aa, Artificial Sequence
  Synthetic peptide
  VARIANT (2)..(2): Xaa is Val or "His
  VARIANT (3)..(3): Xaa is Ile or "Leu" or "Val"
  VARIANT (5)..(5): Xaa is Met or "Thr"
IXXEXARE

SEQ ID NO: 13 - protein, 8 aa, Artificial Sequence
  Synthetic peptide
  VARIANT (3)..(3): Xaa is Ile or "Leu" or "Val"
IVXEMARE

SEQ ID NO: 14 - protein, 8 aa, Artificial Sequence
  Synthetic peptide
  VARIANT (4)..(4): Xaa is His or "Leu"
  VARIANT (7)..(7): Xaa is Arg or "Val"
  VARIANT (8)..(8): Xaa is Glu or "Val"
HHAXDAXX

SEQ ID NO: 15 - protein, 8 aa, Artificial Sequence
  Synthetic peptide
HHAHDAYL

SEQ ID NO: 16 - protein, 30 aa, Artificial Sequence
  Synthetic polypeptide
  VARIANT (2)..(2): Xaa is Lys or "Pro"
  VARIANT (4)..(4): Xaa is Val or "Leu" or "Ile" or "Phe"
  VARIANT (5)..(5): Xaa is Gly or "Ala" or "Ser"
  VARIANT (6)..(6): Xaa is Leu or "Ile" or "Val" or "Phe"
  VARIANT (7)..(26): Any amino acid and this region may encompass 5-20 residues wherein some positions may be absent
  VARIANT (29)..(29): Xaa is Asp or "Glu" or "Asn" or "Gln"
KXYXXXXXXXXXXXXXXXXXXXXXXXTDXY

SEQ ID NO: 17 - protein, 27 aa, Artificial Sequence
  Synthetic peptide
  VARIANT (1)..(1): Xaa is Asp or "Glu" or "Gln" or "Asn"
  VARIANT (2)..(2): Xaa is Leu or "Ile" or "Arg" or "Gln" or "Val" or "Met" or "Lys"
  VARIANT (3)..(3): Xaa is Asp or "Glu"
  VARIANT (5)..(5): Xaa is Ile or "Val" or "Thr" or "Ala" or "Leu"
  VARIANT (6)..(6): Xaa is Val or "Tyr" or "Ile" or "Leu" or "Phe" or "Trp"
  VARIANT (8)..(8): Xaa is Gln or "His" or "Arg" or "Lys" or "Tyr" or "Ile" or "Leu" or "Phe" or "Trp"
  VARIANT (9)..(9): Xaa is Ser or "Ala" or "Asp" or "Thr" or "Lys"
  VARIANT (10)..(10): Xaa is Phe or "Leu" or "Val" or "Lys" or "Tyr" or "Met" or "Ile" or "Arg" or "Ala" or "Glu" or "Asp" or "Gln"
  VARIANT (11)..(11): Xaa is Leu or "Arg" or "Thr" or "Ile" or "Val" or "Ser" or "Cys" or "Tyr" or "Lys" or "Phe" or "Gly"
  VARIANT (12)..(12): Xaa is Lys or "Gln" or "Tyr" or "Thr" or "Phe" or "Leu" or "Trp" or "Met" or "Ala" or "Glu" or "Gly" or "Ser"
  VARIANT (13)..(13): Xaa is Asp or "Ser" or "Asn" or "Arg" or "Leu" or "Thr"
  VARIANT (14)..(14): Xaa is Asp or "Asn" or "Ser"
  VARIANT (15)..(15): Xaa is Ser or "Ala" or "Thr" or "Gly" or "Arg"
  VARIANT (16)..(16): Xaa is Ile or "Leu" or "Phe" or "Ser" or "Arg" or "Tyr" or "Gln" or "Trp" or "Asp" or "Lys" or "His"
  VARIANT (17)..(17): Xaa is Asp or "Ser" or "Ile" or "Asn" or "Glu" or "Ala" or "His" or "Phe" or "Leu" or "Gln" or "Met" or "Gly" or "Tyr" or "Val"
  VARIANT (19)..(19): Xaa is Lys or "Leu" or "Arg" or "Met" or "Thr" or "Phe"
  VARIANT (20)..(20): Xaa is Val or "Leu" or "Ile" or "Ala" or "Thr"
  VARIANT (21)..(21): Xaa is Leu or "Ile" or "Val" or "Ala"
  VARIANT (22)..(22): Xaa is Thr or "Val" or "Cys" or "Glu" or "Ser" or "Ala"
  VARIANT (23)..(23): Xaa is Arg or "Phe" or "Thr" or "Trp" or "Glu" or "Leu" or "Asn" or "Cys" or "Lys" or "Val" or "Ser" or "Gln" or "Ile" or "Tyr" or "His" or "Ala"
  VARIANT (24)..(24): Xaa is Ser or "Pro" or "Arg" or "Lys" or "Asn" or "Ala" or "His" or "Gln" or "Gly" or "Leu"
  VARIANT (25)..(25): Xaa is Asp or "Gly" or "Thr" or "Asn" or "Ser" or "Lys" or "Ala" or "Ile" or "Glu" or "Leu" or "Gln" or " Arg" or "Tyr"
  VARIANT (26)..(26): Xaa is Lys or "Val" or "Ala" or "Glu" or "Tyr" or "Ile" or "Cys" or "Leu" or "Ser" or "Thr" or "Gly" or "Lys" or "Met" or "Asp" or "Phe"
XXXHXXPXXXXXXXXXXNXXXXXXXXN

SEQ ID NO: 18 - protein, 27 aa, Artificial Sequence
  Synthetic peptide
  VARIANT (1)..(1): Xaa is Asp or"Glu
  VARIANT (2)..(2): Xaa is Leu or "Ile" or "Arg" or "Gln" or "Val" or "Met" or "Lys"
  VARIANT (3)..(3): Xaa is Asp or "Glu
  VARIANT (5)..(5): Xaa is Ile or "Val" or "Thr" or "Ala" or "Leu"
  VARIANT (6)..(6): Xaa is Val or "Tyr" or "Ile" or "Leu" or "Phe" or "Trp"
  VARIANT (8)..(8): Xaa is Gln or "His" or "Arg" or "Lys" or "Tyr" or "Ile" or "Leu" or "Phe" or "Trp"
  VARIANT (10)..(10): Xaa is Phe or "Leu" or "Val" or "Lys" or "Tyr" or "Met" or "Ile" or "Arg" or "Ala" or "Glu" or "Asp" or "Gln"
  VARIANT (11)..(11): Xaa is Leu or "Arg" or "Thr" or "Ile" or "Val" or "Ser" or "Cys" or "Tyr" or "Lys" or "Phe" or "Gly"
  VARIANT (12)..(12): Xaa is Lys or "Gln" or "Tyr" or "Thr" or "Phe" or "Leu" or "Trp" or "Met" or "Ala" or "Glu" or "Gly" or "Ser"
  VARIANT (16)..(16): Xaa is Ile or "Leu" or "Phe" or "Ser" or "Arg" or "Tyr" or "Gln" or "Trp" or "Asp" or "Lys" or "His"
  VARIANT (17)..(17): Xaa is Asp or "Ser" or "Ile" or "Asn" or "Glu" or "Ala" or "His" or "Phe" or "Leu" or "Gln" or "Met" or "Gly" or Tyr" or "Val"
  VARIANT (22)..(22): Xaa is Thr or "Val" or "Cys" or "Glu" or "Ser" or "Ala"
  VARIANT (23)..(23): Xaa is Arg or "Phe" or "Thr" or "Trp" or "Glu" or "Leu" or "Asn" or "Cys" or "Lys" or "Val" or "Ser" or "Gln" or "Ile" or "Tyr" or "His" or "Ala"
  VARIANT (24)..(24): Xaa is Ser or "Pro" or "Arg" or "Lys" or "Asn" or "Ala" or "His" or "Gln" or "Gly" or "Leu"
  VARIANT (25)..(25): Xaa is Asp or "Gly" or "Thr" or "Asn" or "Ser" or "Lys" or "Ala" or "Ile" or "Glu" or "Leu" or "Gln" or "Arg" or "Tyr"
  VARIANT (26)..(26): Xaa is Lys or "Val" or "Ala" or "Glu" or "Tyr" or "Ile" or "Cys" or "Leu" or "Ser" or "Thr" or "Gly" or "Lys" "Met" or "Asp" or "Phe"
XXXHXXPXSXXXDDSXXNKVLXXXXXN

SEQ ID NO: 19 - protein, 27 aa, Artificial Sequence
  Synthetic peptide
  VARIANT (1)..(1): Xaa is Asp or "Glu"
  VARIANT (3)..(3): Xaa is Asp or "Glu"
  VARIANT (8)..(8): Xaa is Gln or "His" or "Arg" or "Lys" or "Tyr" or "Ile" or "Leu" or "Trp"
  VARIANT (10)..(10): Xaa is Phe or "Leu" or "Val" or "Lys" or "Tyr" or "Met" or "Ile" or "Arg" or "Ala" or "Glu" or "Asp" or "Gln"
  VARIANT (11)..(11): Xaa is Leu or "Arg" or "Thr" or "Ile" or "Val" or "Ser" or "Cys" or "Tyr" or "Lys" or "Phe" or "Gly"
  VARIANT (12)..(12): Xaa is Lys or "Gln" or "Tyr" or "Thr" or "Phe" or "Leu" or "Trp" or "Met" or "Ala" or "Glu" or "Gly" or "Ser"
  VARIANT (16)..(16): Xaa is Ile or "Leu" or "Phe" or "Ser" or "Arg" or "Tyr" or "Gln" or "Trp" or "Asp" or "Lys" or "His"
  VARIANT (17)..(17): Xaa is Asp or "Ser" or "Ile" or "Asn" or "Glu" or "Ala" or "His" or "Phe" or "Leu" or "Gln" or "Met" or "Gly" or "Tyr" or "Val"
  VARIANT (23)..(23): Xaa is Arg or "Phe" or "Thr" or "Trp" or "Glu" or "Leu" or "Asn" or "Cys" or "Lys" or "Val" or "Ser" or "Gln" or "Ile" or "Tyr" or "His" or "Ala"
  VARIANT (24)..(24): Xaa is Ser or "Pro" or "Arg" or "Lys" or "Asn" or "Ala" or "His" or "Gln" or "Gly" or "Leu"
  VARIANT (25)..(25): Xaa is Asp or "Gly" or "Thr" or "Asn" or "Ser" or "Lys" or "Ala" or "Ile" or "Glu" or "Leu" or "Gln" or "Arg" or "Tyr"
  VARIANT (26)..(26): Xaa is Lys or "Val" or "Ala" or "Glu" or "Tyr" or "Ile" or "Cys" or "Leu" or "Ser" or "Thr" or "Gly" or "Lys" or "Met" or "Asp" or "Phe"
XVXHIVPXSXXXDDSXXNKVLTXXXXN

SEQ ID NO: 20 - protein, 27 aa, Artificial Sequence
  Synthetic peptide
  VARIANT (2)..(2): Xaa is Ile or "Val"
  VARIANT (6)..(6): Xaa is Ile or "Val"
  VARIANT (9)..(9): Xaa is Ala or "Ser"
  VARIANT (11)..(11): Xaa is Ile or "Leu"
  VARIANT (12)..(12): Xaa is Lys or "Thr"
  VARIANT (14)..(14): Xaa is Asp or "Asn"
  VARIANT (19)..(19): Xaa is Arg or "Lys" or "Leu"
  VARIANT (22)..(22): Xaa is Thr or "Val"
  VARIANT (23)..(23): Xaa is Ser or "Arg"
  VARIANT (25)..(25): Xaa is Lys or "Asp" or "Ala"
  VARIANT (26)..(26): Xaa is Glu or "Lys" or "Gly" or "Asn"
DXDHIXPQXFXXDXSIDNXVLXXSXXN

SEQ ID NO: 21 - protein, 73 aa, Artificial Sequence
  Synthetic polypeptide
  VARIANT (8)..(8): Xaa is Lys or "Arg"
  VARIANT (12)..(12): Xaa is Val or "Thr"
  VARIANT (13)..(13): Xaa is Gly or "Asp"
  VARIANT (14)..(14): Xaa is Glu or "Gln" or "Asp"
  VARIANT (15)..(15): Xaa is Glu or "Asp"
  VARIANT (19)..(19): Xaa is Asp or "Asn" or "His"
  VARIANT (20)..(20): Xaa is Tyr or "Arg" or "Asn"
  VARIANT (23)..(23): Xaa is Gln or "Asp" or "Asn"
  VARIANT (25)..(64): Any amino acid and this region may encompass 15-40 residues wherein some positions may be absent
  VARIANT (67)..(67): Xaa is Gly or "Glu"
  VARIANT (69)..(69): Xaa is Ser or "Gly"
  VARIANT (71)..(71): Xaa is Asp or "Asn"
LYYLQNGXDMYXXXXLDIXXLSXYXXXXXXXXXXXXXXXXXXXXXXXXXXXXXXXXXXXXXXXXNRXKXDXVP

SEQ ID NO: 22 - DNA, 4107 bp, Artificial Sequence
  Synthetic polynucleotide
atggataaaaagtacagcatcgggctggacatcggtacaaactcagtggggtgggccgtgattacggacgagtacaaggtaccctccaaaaaatttaaagtgctgggtaacacggacagacactctataaagaaaaatcttattggagccttgctgttcgactcaggcgagacagccgaagccacaaggttgaagcggaccgccaggaggcggtataccaggagaaagaaccgcatatgctacctgcaagaaatcttcagtaacgagatggcaaaggttgacgatagctttttccatcgcctggaagaatcctttcttgttgaggaagacaagaagcacgaacggcaccccatctttggcaatattgtcgacgaagtggcatatcacgaaaagtacccgactatctaccacctcaggaagaagctggtggactctaccgataaggcggacctcagacttatttatttggcactcgcccacatgattaaatttagaggacatttcttgatcgagggcgacctgaacccggacaacagtgacgtcgataagctgttcatccaacttgtgcagacctacaatcaactgttcgaagaaaaccctataaatgcttcaggagtcgacgctaaagcaatcctgtccgcgcgcctctcaaaatctagaagacttgagaatctgattgctcagttgcccggggaaaagaaaaatggattgtttggcaacctgatcgccctcagtctcggactgaccccaaatttcaaaagtaacttcgacctggccgaagacgctaagctccagctgtccaaggacacatacgatgacgacctcgacaatctgctggcccagattggggatcagtacgccgatctctttttggcagcaaagaacctgtccgacgccatcctgttgagcgatatcttgagagtgaacaccgaaattactaaagcaccccttagcgcatctatgatcaagcggtacgacgagcatcatcaggatctgaccctgctgaaggctcttgtgaggcaacagctccccgaaaaatacaaggaaatcttctttgaccagagcaaaaacggctacgctggctatatagatggtggggccagtcaggaggaattctataaattcatcaagcccattctcgagaaaatggacggcacagaggagttgctggtcaaacttaacagggaggacctgctgcggaagcagcggacctttgacaacgggtctatcccccaccagattcatctgggcgaactgcacgcaatcctgaggaggcaggaggatttttatccttttcttaaagataaccgcgagaaaatagaaaagattcttacattcaggatcccgtactacgtgggacctctcgcccggggcaattcacggtttgcctggatgacaaggaagtcagaggagactattacaccttggaacttcgaagaagtggtggacaagggtgcatctgcccagtctttcatcgagcggatgacaaattttgacaagaacctccctaatgagaaggtgctgcccaaacattctctgctctacgagtactttaccgtctacaatgaactgactaaagtcaagtacgtcaccgagggaatgaggaagccggcattccttagtggagaacagaagaaggcgattgtagacctgttgttcaagaccaacaggaaggtgactgtgaagcaacttaaagaagactactttaagaagatcgaatgttttgacagtgtggaaatttcaggggttgaagaccgcttcaatgcgtcattggggacttaccatgatcttctcaagatcataaaggacaaagacttcctggacaacgaagaaaatgaggatattctcgaagacatcgtcctcaccctgaccctgttcgaagacagggaaatgatagaagagcgcttgaaaacctatgcccacctcttcgacgataaagttatgaagcagctgaagcgcaggagatacacaggatggggaagattgtcaaggaagctgatcaatggaattagggataaacagagtggcaagaccatactggatttcctcaaatctgatggcttcgccaataggaacttcatgcaactgattcacgatgactctcttaccttcaaggaggacattcaaaaggctcaggtgagcgggcagggagactcccttcatgaacacatcgcgaatttggcaggttcccccgctattaaaaagggcatccttcaaactgtcaaggtggtggatgaattggtcaaggtaatgggcagacataagccagaaaatattgtgatcgagatggcccgcgaaaaccagaccacacagaagggccagaaaaatagtagagagcggatgaagaggatcgaggagggcatcaaagagctgggatctcagattctcaaagaacaccccgtagaaaacacacagctgcagaacgaaaaattgtacttgtactatctgcagaacggcagagacatgtacgtcgaccaagaacttgatattaatagactgtccgactatgacgtagaccatatcgtgccccagtccttcctgaaggacgactccattgataacaaagtcttgacaagaagcgacaagaacaggggtaaaagtgataatgtgcctagcgaggaggtggtgaaaaaaatgaagaactactggcgacagctgcttaatgcaaagctcattacacaacggaagttcgataatctgacgaaagcagagagaggtggcttgtctgagttggacaaggcagggtttattaagcggcagctggtggaaactaggcagatcacaaagcacgtggcgcagattttggacagccggatgaacacaaaatacgacgaaaatgataaactgatacgagaggtcaaagttatcacgctgaaaagcaagctggtgtccgattttcggaaagacttccagttctacaaagttcgcgagattaataactaccatcatgctcacgatgcgtacctgaacgctgttgtcgggaccgccttgataaagaagtacccaaagctggaatccgagttcgtatacggggattacaaagtgtacgatgtgaggaaaatgatagccaagtccgagcaggagattggaaaggccacagctaagtacttcttttattctaacatcatgaatttttttaagacggaaattaccctggccaacggagagatcagaaagcggccccttatagagacaaatggtgaaacaggtgaaatcgtctgggataagggcagggatttcgctactgtgaggaaggtgctgagtatgccacaggtaaatatcgtgaaaaaaaccgaagtacagaccggaggattttccaaggaaagcattttgcctaaaagaaactcagacaagctcatcgcccgcaagaaagattgggaccctaagaaatacgggggatttgactcacccaccgtagcctattctgtgctggtggtagctaaggtggaaaaaggaaagtctaagaagctgaagtccgtgaaggaactcttgggaatcactatcatggaaagatcatcctttgaaaagaaccctatcgatttcctggaggctaagggttacaaggaggtcaagaaagacctcatcattaaactgccaaaatactctctcttcgagctggaaaatggcaggaagagaatgttggccagcgccggagagctgcaaaagggaaacgagcttgctctgccctccaaatatgttaattttctctatctcgcttcccactatgaaaagctgaaagggtctcccgaagataacgagcagaagcagctgttcgtcgaacagcacaagcactatctggatgaaataatcgaacaaataagcgagttcagcaaaagggttatcctggcggatgctaatttggacaaagtactgtctgcttataacaagcaccgggataagcctattagggaacaagccgagaatataattcacctctttacactcacgaatctcggagcccccgccgccttcaaatactttgatacgactatcgaccggaaacggtataccagtaccaaagaggtcctcgatgccaccctcatccaccagtcaattactggcctgtacgaaacacggatcgacctctctcaactgggcggcgactag

SEQ ID NO: 23 - protein, 1368 aa, Streptococcus pyogenes [sequence omitted]

SEQ ID NO: 24 - DNA, 3249 bp, Artificial Sequence
  Synthetic polynucleotide
atggccgccttcaagcccaaccccatcaactacatcctgggcctggacatcggcatcgccagcgtgggctgggccatggtggagatcgacgaggacgagaaccccatctgcctgatcgacctgggtgtgcgcgtgttcgagcgcgctgaggtgcccaagactggtgacagtctggctatggctcgccggcttgctcgctctgttcggcgccttactcgccggcgcgctcaccgccttctgcgcgctcgccgcctgctgaagcgcgagggtgtgctgcaggctgccgacttcgacgagaacggcctgatcaagagcctgcccaacactccttggcagctgcgcgctgccgctctggaccgcaagctgactcctctggagtggagcgccgtgctgctgcacctgatcaagcaccgcggctacctgagccagcgcaagaacgagggcgagaccgccgacaaggagctgggtgctctgctgaagggcgtggccgacaacgcccacgccctgcagactggtgacttccgcactcctgctgagctggccctgaacaagttcgagaaggagagcggccacatccgcaaccagcgcggcgactacagccacaccttcagccgcaaggacctgcaggccgagctgatcctgctgttcgagaagcagaaggagttcggcaacccccacgtgagcggcggcctgaaggagggcatcgagaccctgctgatgacccagcgccccgccctgagcggcgacgccgtgcagaagatgctgggccactgcaccttcgagccagccgagcccaaggccgccaagaacacctacaccgccgagcgcttcatctggctgaccaagctgaacaacctgcgcatcctggagcagggcagcgagcgccccctgaccgacaccgagcgcgccaccctgatggacgagccctaccgcaagagcaagctgacctacgcccaggcccgcaagctgctgggtctggaggacaccgccttcttcaagggcctgcgctacggcaaggacaacgccgaggccagcaccctgatggagatgaaggcctaccacgccatcagccgcgccctggagaaggagggcctgaaggacaagaagagtcctctgaacctgagccccgagctgcaggacgagatcggcaccgccttcagcctgttcaagaccgacgaggacatcaccggccgcctgaaggaccgcatccagcccgagatcctggaggccctgctgaagcacatcagcttcgacaagttcgtgcagatcagcctgaaggccctgcgccgcatcgtgcccctgatggagcagggcaagcgctacgacgaggcctgcgccgagatctacggcgaccactacggcaagaagaacaccgaggagaagatctacctgcctcctatccccgccgacgagatccgcaaccccgtggtgctgcgcgccctgagccaggcccgcaaggtgatcaacggcgtggtgcgccgctacggcagccccgcccgcatccacatcgagaccgcccgcgaggtgggcaagagcttcaaggaccgcaaggagatcgagaagcgccaggaggagaaccgcaaggaccgcgagaaggccgccgccaagttccgcgagtacttccccaacttcgtgggcgagcccaagagcaaggacatcctgaagctgcgcctgtacgagcagcagcacggcaagtgcctgtacagcggcaaggagatcaacctgggccgcctgaacgagaagggctacgtggagatcgaccacgccctgcccttcagccgcacctgggacgacagcttcaacaacaaggtgctggtgctgggcagcgagaaccagaacaagggcaaccagaccccctacgagtacttcaacggcaaggacaacagccgcgagtggcaggagttcaaggcccgcgtggagaccagccgcttcccccgcagcaagaagcagcgcatcctgctgcagaagttcgacgaggacggcttcaaggagcgcaacctgaacgacacccgctacgtgaaccgcttcctgtgccagttcgtggccgaccgcatgcgcctgaccggcaagggcaagaagcgcgtgttcgccagcaacggccagatcaccaacctgctgcgcggcttctggggcctgcgcaaggtgcgcgccgagaacgaccgccaccacgccctggacgccgtggtggtggcctgcagcaccgtggccatgcagcagaagatcacccgcttcgtgcgctacaaggagatgaacgccttcgacggtaaaaccatcgacaaggagaccggcgaggtgctgcaccagaagacccacttcccccagccctgggagttcttcgcccaggaggtgatgatccgcgtgttcggcaagcccgacggcaagcccgagttcgaggaggccgacacccccgagaagctgcgcaccctgctggccgagaagctgagcagccgccctgaggccgtgcacgagtacgtgactcctctgttcgtgagccgcgcccccaaccgcaagatgagcggtcagggtcacatggagaccgtgaagagcgccaagcgcctggacgagggcgtgagcgtgctgcgcgtgcccctgacccagctgaagctgaaggacctggagaagatggtgaaccgcgagcgcgagcccaagctgtacgaggccctgaaggcccgcctggaggcccacaaggacgaccccgccaaggccttcgccgagcccttctacaagtacgacaaggccggcaaccgcacccagcaggtgaaggccgtgcgcgtggagcaggtgcagaagaccggcgtgtgggtgcgcaaccacaacggcatcgccgacaacgccaccatggtgcgcgtggacgtgttcgagaagggcgacaagtactacctggtgcccatctacagctggcaggtggccaagggcatcctgcccgaccgcgccgtggtgcagggcaaggacgaggaggactggcagctgatcgacgacagcttcaacttcaagttcagcctgcaccccaacgacctggtggaggtgatcaccaagaaggcccgcatgttcggctacttcgccagctgccaccgcggcaccggcaacatcaacatccgcatccacgacctggaccacaagatcggcaagaacggcatcctggagggcatcggcgtgaagaccgccctgagcttccagaagtaccagatcgacgagctgggcaaggagatccgcccctgccgcctgaagaagcgccctcctgtgcgctaa

SEQ ID NO: 25 - protein, 1082 aa, Neisseria meningitidis
MAAFKPNPINYILGLDIGIASVGWAMVEIDEDENPICLIDLGVRVFERAEVPKTGDSLAMARRLARSVRRLTRRRAHRLLRARRLLKREGVLQAADFDENGLIKSLPNTPWQLRAAALDRKLTPLEWSAVLLHLIKHRGYLSQRKNEGETADKELGALLKGVADNAHALQTGDFRTPAELALNKFEKESGHIRNQRGDYSHTFSRKDLQAELILLFEKQKEFGNPHVSGGLKEGIETLLMTQRPALSGDAVQKMLGHCTFEPAEPKAAKNTYTAERFIWLTKLNNLRILEQGSERPLTDTERATLMDEPYRKSKLTYAQARKLLGLEDTAFFKGLRYGKDNAEASTLMEMKAYHAISRALEKEGLKDKKSPLNLSPELQDEIGTAFSLFKTDEDITGRLKDRIQPEILEALLKHISFDKFVQISLKALRRIVPLMEQGKRYDEACAEIYGDHYGKKNTEEKIYLPPIPADEIRNPVVLRALSQARKVINGVVRRYGSPARIHIETAREVGKSFKDRKEIEKRQEENRKDREKAAAKFREYFPNFVGEPKSKDILKLRLYEQQHGKCLYSGKEINLGRLNEKGYVEIDHALPFSRTWDDSFNNKVLVLGSENQNKGNQTPYEYFNGKDNSREWQEFKARVETSRFPRSKKQRILLQKFDEDGFKERNLNDTRYVNRFLCQFVADRMRLTGKGKKRVFASNGQITNLLRGFWGLRKVRAENDRHHALDAVVVACSTVAMQQKITRFVRYKEMNAFDGKTIDKETGEVLHQKTHFPQPWEFFAQEVMIRVFGKPDGKPEFEEADTPEKLRTLLAEKLSSRPEAVHEYVTPLFVSRAPNRKMSGQGHMETVKSAKRLDEGVSVLRVPLTQLKLKDLEKMVNREREPKLYEALKARLEAHKDDPAKAFAEPFYKYDKAGNRTQQVKAVRVEQVQKTGVWVRNHNGIADNATMVRVDVFEKGDKYYLVPIYSWQVAKGILPDRAVVQGKDEEDWQLIDDSFNFKFSLHPNDLVEVITKKARMFGYFASCHRGTGNINIRIHDLDHKIGKNGILEGIGVKTALSFQKYQIDELGKEIRPCRLKKRPPVR

SEQ ID NO: 26 - protein, 1053 aa, Staphylococcus aureus
MKRNYILGLDIGITSVGYGIIDYETRDVIDAGVRLFKEANVENNEGRRSKRGARRLKRRRRHRIQRVKKLLFDYNLLTDHSELSGINPYEARVKGLSQKLSEEEFSAALLHLAKRRGVHNVNEVEEDTGNELSTKEQISRNSKALEEKYVAELQLERLKKDGEVRGSINRFKTSDYVKEAKQLLKVQKAYHQLDQSFIDTYIDLLETRRTYYEGPGEGSPFGWKDIKEWYEMLMGHCTYFPEELRSVKYAYNADLYNALNDLNNLVITRDENEKLEYYEKFQIIENVFKQKKKPTLKQIAKEILVNEEDIKGYRVTSTGKPEFTNLKVYHDIKDITARKEIIENAELLDQIAKILTIYQSSEDIQEELTNLNSELTQEEIEQISNLKGYTGTHNLSLKAINLILDELWHTNDNQIAIFNRLKLVPKKVDLSQQKEIPTTLVDDFILSPVVKRSFIQSIKVINAIIKKYGLPNDIIIELAREKNSKDAQKMINEMQKRNRQTNERIEEIIRTTGKENAKYLIEKIKLHDMQEGKCLYSLEAIPLEDLLNNPFNYEVDHIIPRSVSFDNSFNNKVLVKQEENSKKGNRTPFQYLSSSDSKISYETFKKHILNLAKGKGRISKTKKEYLLEERDINRFSVQKDFINRNLVDTRYATRGLMNLLRSYFRVNNLDVKVKSINGGFTSFLRRKWKFKKERNKGYKHHAEDALIIANADFIFKEWKKLDKAKKVMENQMFEEKQAESMPEIETEQEYKEIFITPHQIKHIKDFKDYKYSHRVDKKPNRELINDTLYSTRKDDKGNTLIVNNLNGLYDKDNDKLKKLINKSPEKLLMYHHDPQTYQKLKLIMEQYGDEKNPLYKYYEETGNYLTKYSKKDNGPVIKKIKYYGNKLNAHLDITDDYPNSRNKVVKLSLKPYRFDVYLDNGVYKFVTVKNLDVIKKENYYEVNSKCYEEAKKLKKISNQAEFIASFYNNDLIKINGELYRVIGVNNDLLNRIEVNMIDITYREYLENMNDKRPPRIIKTIASKTQSIKKYSTDILGNLYEVKSKKHPQIIKKG

SEQ ID NO: 27 - RNA, 104 nt, Artificial Sequence
  Synthetic polynucleotide
  modified_base (1)..(20): a, c, u, g, unknown or other
  misc_feature (1)..(20): n is a, c, g, or u
nnnnnnnnnnnnnnnnnnnnguuuuagagcuaugcugaaaagcauagcaaguuaaaauaaggcuaguccguuaucaacuugaaaaaguggcaccgagucggugc

SEQ ID NO: 28 - RNA, 106 nt, Artificial Sequence
  Synthetic polynucleotide
  modified_base (1)..(20): a, c, u, g, unknown or other
  misc_feature (1)..(20): n is a, c, g, or u
nnnnnnnnnnnnnnnnnnnnguuuuagagcuaugcuggaaacagcauagcaaguuaaaauaaggcuaguccguuaucaacuugaaaaaguggcaccgagucggugc

SEQ ID NO: 29 - RNA, 116 nt, Artificial Sequence
  Synthetic polynucleotide
  modified_base (1)..(20): a, c, u, g, unknown or other
  misc_feature (1)..(20): n is a, c, g, or u
nnnnnnnnnnnnnnnnnnnnguuuuagagcuaugcuguuuuggaaacaaaacagcauagcaaguuaaaauaaggcuaguccguuaucaacuugaaaaaguggcaccgagucggugc

SEQ ID NO: 30 - RNA, 96 nt, Artificial Sequence
  Synthetic oligonucleotide
  modified_base (1)..(20): a, c, u, g, unknown or other
  misc_feature (1)..(20): n is a, c, g, or u
nnnnnnnnnnnnnnnnnnnnguauuagagcuagaaauagcaaguuaauauaaggcuaguccguuaucaacuugaaaaaguggcaccgagucggugc

SEQ ID NO: 31 - RNA, 96 nt, Artificial Sequence
  Synthetic oligonucleotide
  modified_base (1)..(20): a, c, u, g, unknown or other
  misc_feature (1)..(20): n is a, c, g, or u
nnnnnnnnnnnnnnnnnnnnguuuaagagcuagaaauagcaaguuuaaauaaggcuaguccguuaucaacuugaaaaaguggcaccgagucggugc

SEQ ID NO: 32 - RNA, 116 nt, Artificial Sequence
  Synthetic polynucleotide
  modified_base (1)..(20): a, c, u, g, unknown or other
  misc_feature (1)..(20): n is a, c, g, or u
nnnnnnnnnnnnnnnnnnnnguauuagagcuaugcuguauuggaaacaauacagcauagcaaguuaauauaaggcuaguccguuaucaacuugaaaaaguggcaccgagucggugc

SEQ ID NO: 33 - RNA, 47 nt, Artificial Sequence
  Synthetic oligonucleotide
aaggcuaguccguuaucaacuugaaaaaguggcaccgagucggugcu

SEQ ID NO: 34 - RNA, 49 nt, Artificial Sequence
  Synthetic oligonucleotide
aaggcuaguccguuaucaacuugaaaaaguggcaccgagucgguggugc

SEQ ID NO: 35 - RNA, 51 nt, Artificial Sequence
  Synthetic oligonucleotide
aaggcuaguccguuaucaacuugaaaaaguggcaccgagucggugcggauc

SEQ ID NO: 36 - RNA, 31 nt, Artificial Sequence
  Synthetic oligonucleotide
aaggcuaguccguuaucaacuugaaaaagug

SEQ ID NO: 37 - RNA, 18 nt, Artificial Sequence
  Synthetic oligonucleotide
aaggcuaguccguuauca

SEQ ID NO: 38 - RNA, 12 nt, Artificial Sequence
  Synthetic oligonucleotide
aaggcuaguccg

SEQ ID NO: 39 - DNA, 3159 bp, Artificial Sequence
  Synthetic polynucleotide
atgaaaaggaactacattctggggctggacatcgggattacaagcgtggggtatgggattattgactatgaaacaagggacgtgatcgacgcaggcgtcagactgttcaaggaggccaacgtggaaaacaatgagggacggagaagcaagaggggagccaggcgcctgaaacgacggagaaggcacagaatccagagggtgaagaaactgctgttcgattacaacctgctgaccgaccattctgagctgagtggaattaatccttatgaagccagggtgaaaggcctgagtcagaagctgtcagaggaagagttttccgcagctctgctgcacctggctaagcgccgaggagtgcataacgtcaatgaggtggaagaggacaccggcaacgagctgtctacaaaggaacagatctcacgcaatagcaaagctctggaagagaagtatgtcgcagagctgcagctggaacggctgaagaaagatggcgaggtgagagggtcaattaataggttcaagacaagcgactacgtcaaagaagccaagcagctgctgaaagtgcagaaggcttaccaccagctggatcagagcttcatcgatacttatatcgacctgctggagactcggagaacctactatgagggaccaggagaagggagccccttcggatggaaagacatcaaggaatggtacgagatgctgatgggacattgcacctattttccagaagagctgagaagcgtcaagtacgcttataacgcagatctgtacaacgccctgaatgacctgaacaacctggtcatcaccagggatgaaaacgagaaactggaatactatgagaagttccagatcatcgaaaacgtgtttaagcagaagaaaaagcctacactgaaacagattgctaaggagatcctggtcaacgaagaggacatcaagggctaccgggtgacaagcactggaaaaccagagttcaccaatctgaaagtgtatcacgatattaaggacatcacagcacggaaagaaatcattgagaacgccgaactgctggatcagattgctaagatcctgactatctaccagagctccgaggacatccaggaagagctgactaacctgaacagcgagctgacccaggaagagatcgaacagattagtaatctgaaggggtacaccggaacacacaacctgtccctgaaagctatcaatctgattctggatgagctgtggcatacaaacgacaatcagattgcaatctttaaccggctgaagctggtcccaaaaaaggtggacctgagtcagcagaaagagatcccaaccacactggtggacgatttcattctgtcacccgtggtcaagcggagcttcatccagagcatcaaagtgatcaacgccatcatcaagaagtacggcctgcccaatgatatcattatcgagctggctagggagaagaacagcaaggacgcacagaagatgatcaatgagatgcagaaacgaaaccggcagaccaatgaacgcattgaagagattatccgaactaccgggaaagagaacgcaaagtacctgattgaaaaaatcaagctgcacgatatgcaggagggaaagtgtctgtattctctggaggccatccccctggaggacctgctgaacaatccattcaactacgaggtcgatcatattatccccagaagcgtgtccttcgacaattcctttaacaacaaggtgctggtcaagcaggaagagaactctaaaaagggcaataggactcctttccagtacctgtctagttcagattccaagatctcttacgaaacctttaaaaagcacattctgaatctggccaaaggaaagggccgcatcagcaagaccaaaaaggagtacctgctggaagagcgggacatcaacagattctccgtccagaaggattttattaaccggaatctggtggacacaagatacgctactcgcggcctgatgaatctgctgcgatcctatttccgggtgaacaatctggatgtgaaagtcaagtccatcaacggcgggttcacatcttttctgaggcgcaaatggaagtttaaaaaggagcgcaacaaagggtacaagcaccatgccgaagatgctctgattatcgcaaatgccgacttcatctttaaggagtggaaaaagctggacaaagccaagaaagtgatggagaaccagatgttcgaagagaagcaggccgaatctatgcccgaaatcgagacagaacaggagtacaaggagattttcatcactcctcaccagatcaagcatatcaaggatttcaaggactacaagtactctcaccgggtggataaaaagcccaacagagagctgatcaatgacaccctgtatagtacaagaaaagacgataaggggaataccctgattgtgaacaatctgaacggactgtacgacaaagataatgacaagctgaaaaagctgatcaacaaaagtcccgagaagctgctgatgtaccaccatgatcctcagacatatcagaaactgaagctgattatggagcagtacggcgacgagaagaacccactgtataagtactatgaagagactgggaactacctgaccaagtatagcaaaaaggataatggccccgtgatcaagaagatcaagtactatgggaacaagctgaatgcccatctggacatcacagacgattaccctaacagtcgcaacaaggtggtcaagctgtcactgaagccatacagattcgatgtctatctggacaacggcgtgtataaatttgtgactgtcaagaatctggatgtcatcaaaaaggagaactactatgaagtgaatagcaagtgctacgaagaggctaaaaagctgaaaaagattagcaaccaggcagagttcatcgcctccttttacaacaacgacctgattaagatcaatggcgaactgtatagggtcatcggggtgaacaatgatctgctgaaccgcattgaagtgaatatgattgacatcacttaccgagagtatctggaaaacatgaatgataagcgcccccctcgaattatcaaaacaattgcctctaagactcagagtatcaaaaagtactcaaccgacattctgggaaacctgtatgaggtgaagagcaaaaagcaccctcagattatcaaaaagggc

SEQ ID NO: 40 - DNA, 20 bp, Artificial Sequence
  Synthetic oligonucleotide
gttagatgtcaccaattgta

SEQ ID NO: 41 - DNA, 43 bp, Artificial Sequence
  Synthetic oligonucleotide
acttttatgggttagatgtcaccaattgtaaggcctgtgactg

SEQ ID NO: 42 - RNA, 42 nt, Streptococcus pyogenes
  modified_base (1)..(20): a, c, u, g, unknown or other
  misc_feature (1)..(20): n is a, c, g, or u
nnnnnnnnnnnnnnnnnnnnguuuuagagcuaugcuguuuug

SEQ ID NO: 43 - RNA, 85 nt, Streptococcus pyogenes
ggaaccauucaaaacagcauagcaaguuaaaauaaggcuaguccguuaucaacuugaaaaaguggcaccgagucggugcuuuuuu

SEQ ID NO: 44 - RNA, 62 nt, Streptococcus pyogenes
  modified_base (1)..(20): a, c, u, g, unknown or other
  misc_feature (1)..(20): n is a, c, g, or u
nnnnnnnnnnnnnnnnnnnnguuuuagagcuagaaauagcaaguuaaaauaaggcuaguccg

SEQ ID NO: 45 - RNA, 102 nt, Streptococcus pyogenes
  modified_base (1)..(20): a, c, u, g, unknown or other
  misc_feature (1)..(20): n is a, c, g, or u
nnnnnnnnnnnnnnnnnnnnguuuuagagcuagaaauagcaaguuaaaauaaggcuaguccguuaucaacuugaaaaaguggcaccgagucggugcuuuuuu

SEQ ID NO: 46 - RNA, 75 nt, Streptococcus pyogenes
  modified_base (1)..(20): a, c, u, g, unknown or other
  misc_feature (1)..(20): n is a, c, g, or u
nnnnnnnnnnnnnnnnnnnnguuuuagagcuaugcugaaaagcauagcaaguuaaaauaaggcuaguccguuauc

SEQ ID NO: 47 - RNA, 87 nt, Streptococcus pyogenes
  modified_base (1)..(20): a, c, u, g, unknown or other
  misc_feature (1)..(20): n is a, c, g, or u
nnnnnnnnnnnnnnnnnnnnguuuuagagcuaugcuguuuuggaaacaaaacagcauagcaaguuaaaauaaggcuaguccguuauc

SEQ ID NO: 48 - RNA, 42 nt, Streptococcus thermophilus
  modified_base (1)..(20): a, c, u, g, unknown or other
  misc_feature (1)..(20): n is a, c, g, or u
nnnnnnnnnnnnnnnnnnnnguuuuagagcuguguuguuucg

SEQ ID NO: 49 - RNA, 78 nt, Streptococcus thermophilus
gggcgaaacaacacagcgaguuaaaauaaggcuuaguccguacucaacuugaaaagguggcaccgauucgguguuuuu

SEQ ID NO: 50 - RNA, 42 nt, Streptococcus pyogenes; identical to SEQ ID NO: 42
  modified_base (1)..(20): a, c, u, g, unknown or other
  misc_feature (1)..(20): n is a, c, g, or u

SEQ ID NO: 51 - RNA, 42 nt, Streptococcus thermophilus; identical to SEQ ID NO: 48
  modified_base (1)..(20): a, c, u, g, unknown or other
  misc_feature (1)..(20): n is a, c, g, or u

SEQ ID NO: 52 - RNA, 85 nt, Streptococcus pyogenes
gaaccauucaaaacagcauagcaaguuaaaauaaggcuaguccguuaucaacuugaaaaaguggcaccgagucggugcuuuuuuu

SEQ ID NO: 53 - RNA, 78 nt, Streptococcus thermophilus; identical to SEQ ID NO: 49

SEQ ID NO: 54 - protein, 12 aa, Artificial Sequence
  Synthetic peptide
DIGTNSVGWAVT

SEQ ID NO: 55 - protein, 12 aa, Artificial Sequence
  Synthetic peptide
DIGTNSVGWAVT

SEQ ID NO: 56 - protein, 12 aa, Artificial Sequence
  Synthetic peptide
DVGTNSVGWAVT

SEQ ID NO: 57 - protein, 12 aa, Artificial Sequence
  Synthetic peptide
DVGTNSVGWAVT

SEQ ID NO: 58 - protein, 12 aa, Artificial Sequence
  Synthetic peptide
DMGTNSVGWAVT

SEQ ID NO: 59 - protein, 12 aa, Artificial Sequence
  Synthetic peptide
DVGTSSVGWAVT

SEQ ID NO: 60 - protein, 12 aa, Artificial Sequence
  Synthetic peptide
DIGTASVGWAVT

SEQ ID NO: 61 - protein, 12 aa, Artificial Sequence
  Synthetic peptide
DVGTGSVGWAVT

SEQ ID NO: 62 - protein, 12 aa, Artificial Sequence
  Synthetic peptide
DIGTNSVGWAVV

SEQ ID NO: 63 - protein, 12 aa, Artificial Sequence
  Synthetic peptide
DIGTNSVGWAVI

SEQ ID NO: 64 - protein, 12 aa, Artificial Sequence
  Synthetic peptide
DIGTNSVGWAVL

SEQ ID NO: 65 - protein, 12 aa, Artificial Sequence
  Synthetic peptide
DLGTNSIGWAVV

SEQ ID NO: 66 - protein, 11 aa, Artificial Sequence
  Synthetic peptide
DLGTNSIGWAI

SEQ ID NO: 67 - protein, 12 aa, Artificial Sequence
  Synthetic peptide
DLGTNSIGWALV

SEQ ID NO: 68 - protein, 12 aa, Artificial Sequence
  Synthetic peptide
DIGTNSVGWCVT

SEQ ID NO: 69 - protein, 12 aa, Artificial Sequence
  Synthetic peptide
DIGTNSVGYAVT

SEQ ID NO: 70 - protein, 12 aa, Artificial Sequence
  Synthetic peptide
DMGTGSLGWAVT

SEQ ID NO: 71 - protein, 12 aa, Artificial Sequence
  Synthetic peptide
DIGTSSVGWAAI

SEQ ID NO: 72 - protein, 12 aa, Artificial Sequence
  Synthetic peptide
DLGTGSVGWAVV

SEQ ID NO: 73 - protein, 12 aa, Artificial Sequence
  Synthetic peptide
DLGVGSVGWAIV

SEQ ID NO: 74 - protein, 12 aa, Artificial Sequence
  Synthetic peptide
DLGIASIGWAII

SEQ ID NO: 75 - protein, 12 aa, Artificial Sequence
  Synthetic peptide
DLGIASVGWAIV

SEQ ID NO: 76 - protein, 12 aa, Artificial Sequence
  Synthetic peptide
DLGVASVGWSIV

SEQ ID NO: 77 - protein, 12 aa, Artificial Sequence
  Synthetic peptide
DIGIASVGWAIL

SEQ ID NO: 78 - protein, 12 aa, Artificial Sequence
  Synthetic peptide
DLGISSVGWSVI

SEQ ID NO: 79 - protein, 12 aa, Artificial Sequence
  Synthetic peptide
DIGIASVGWSVI

SEQ ID NO: 80 - protein, 12 aa, Artificial Sequence
  Synthetic peptide
DVGIGSIGWAVI

SEQ ID NO: 81 - protein, 12 aa, Artificial Sequence
  Synthetic peptide
DLGVGSIGFAIV

SEQ ID NO: 82 - protein, 12 aa, Artificial Sequence
  Synthetic peptide
DIGYASIGWAVI

SEQ ID NO: 83 - protein, 12 aa, Artificial Sequence
  Synthetic peptide
DTGTNSLGWAIV

SEQ ID NO: 84 - protein, 12 aa, Artificial Sequence
  Synthetic peptide
DLGTNSIGWCLL

SEQ ID NO: 85 - protein, 12 aa, Artificial Sequence
  Synthetic peptide
DIGTDSLGWAVF

SEQ ID NO: 86 - protein, 12 aa, Artificial Sequence
  Synthetic peptide
DIGSNSIGFAVV

SEQ ID NO: 87 - protein, 12 aa, Artificial Sequence
  Synthetic peptide
DLGVGSIGVAVA

SEQ ID NO: 88 - protein, 12 aa, Artificial Sequence
  Synthetic peptide
DLGIASCGWGVV

SEQ ID NO: 89 - protein, 12 aa, Artificial Sequence
  Synthetic peptide
DLGIASVGWCLT

SEQ ID NO: 90 - protein, 12 aa, Artificial Sequence
  Synthetic peptide
DIGIGSVGVGIL

SEQ ID NO: 91 - protein, 12 aa, Artificial Sequence
  Synthetic peptide
DIGITSVGYGLI

SEQ ID NO: 92 - protein, 12 aa, Artificial Sequence
  Synthetic peptide
DIGITSVGFGII

SEQ ID NO: 93 - protein, 12 aa, Artificial Sequence
  Synthetic peptide
DVGITSTGYAVL

SEQ ID NO: 94 - protein, 12 aa, Artificial Sequence
  Synthetic peptide
DLGITSFGYAIL

SEQ ID NO: 95 - protein, 12 aa, Artificial Sequence
  Synthetic peptide
DIGNASVGWSAF

SEQ ID NO: 96 - protein, 12 aa, Artificial Sequence
  Synthetic peptide
DVGTNSCGWVAM

SEQ ID NO: 97 - protein, 12 aa, Artificial Sequence
  Synthetic peptide
DVGERSIGLAAV

SEQ ID NO: 98 - protein, 12 aa, Artificial Sequence
  Synthetic peptide
DVGLNSVGLAAV

SEQ ID NO: 99 - protein, 12 aa, Artificial Sequence
  Synthetic peptide
DVGLMSVGLAAI

SEQ ID NO: 100 - protein, 12 aa, Artificial Sequence
  Synthetic peptide
DVGTFSVGLAAI

SEQ ID NO: 101 - protein, 12 aa, Artificial Sequence
  Synthetic peptide
DIGTGSVGYACM

SEQ ID NO: 102 - protein, 12 aa, Artificial Sequence
  Synthetic peptide
DLGTTSIGFAHI

SEQ ID NO: 103 - protein, 12 aa, Artificial Sequence
  Synthetic peptide
DLGTNSIGSSVR

SEQ ID NO: 104 - protein, 12 aa, Artificial Sequence
  Synthetic peptide
DIGTNSVGWAVT

SEQ ID NO: 105 - protein, 12 aa, Artificial Sequence
  Synthetic peptide
DIGTNSVGWAVT

SEQ ID NO: 106 - protein, 12 aa, Artificial Sequence
  Synthetic peptide
DVGTNSVGWAVT

SEQ ID NO: 107 - protein, 12 aa, Artificial Sequence
  Synthetic peptide
DVGTNSVGWAVT

SEQ ID NO: 108 - protein, 12 aa, Artificial Sequence
  Synthetic peptide
DMGTNSVGWAVT

SEQ ID NO: 109 - protein, 12 aa, Artificial Sequence
  Synthetic peptide
DVGTSSVGWAVT

SEQ ID NO: 110 - protein, 12 aa, Artificial Sequence
  Synthetic peptide
DIGTASVGWAVT

SEQ ID NO: 111 - protein, 12 aa, Artificial Sequence
  Synthetic peptide
DVGTGSVGWAVT

SEQ ID NO: 112 - protein, 12 aa, Artificial Sequence
  Synthetic peptide
DIGTNSVGWAVV

SEQ ID NO: 113 - protein, 12 aa, Artificial Sequence
  Synthetic peptide
DIGTNSVGWAVI

SEQ ID NO: 114 - protein, 12 aa, Artificial Sequence
  Synthetic peptide
DIGTNSIGWAVI

SEQ ID NO: 115 - protein, 12 aa, Artificial Sequence
  Synthetic peptide
DIGTNSVGWAVL

SEQ ID NO: 116 - protein, 12 aa, Artificial Sequence
  Synthetic peptide
DLGTNSIGWAVV

SEQ ID NO: 117 - protein, 11 aa, Artificial Sequence
  Synthetic peptide
DLGTNSIGWAI

SEQ ID NO: 118 - protein, 12 aa, Artificial Sequence
  Synthetic peptide
DLGTNSIGWALV

SEQ ID NO: 119 - protein, 12 aa, Artificial Sequence
  Synthetic peptide
DIGTNSVGWCVT

SEQ ID NO: 120 - protein, 12 aa, Artificial Sequence
  Synthetic peptide
DIGTNSVGYAVT

SEQ ID NO: 121 - protein, 12 aa, Artificial Sequence
  Synthetic peptide
DMGTGSLGWAVT

SEQ ID NO: 122 - protein, 12 aa, Artificial Sequence
  Synthetic peptide
DIGTSSVGWAAI

SEQ ID NO: 123 - protein, 12 aa, Artificial Sequence
  Synthetic peptide
DLGTGSVGWAVV

SEQ ID NO: 124 - protein, 12 aa, Artificial Sequence
  Synthetic peptide
DLGVGSVGWAIV

SEQ ID NO: 125 - protein, 12 aa, Artificial Sequence
  Synthetic peptide
DLGIASIGWAII

SEQ ID NO: 126 - protein, 12 aa, Artificial Sequence
  Synthetic peptide
DLGIASVGWAIV

SEQ ID NO: 127 - protein, 12 aa, Artificial Sequence
  Synthetic peptide
DLGIASVGWAVV

SEQ ID NO: 128 - protein, 12 aa, Artificial Sequence
  Synthetic peptide
DLGVASVGWSIV

SEQ ID NO: 129 - protein, 12 aa, Artificial Sequence
  Synthetic peptide
DIGIASVGWAIL

SEQ ID NO: 130 - protein, 12 aa, Artificial Sequence
  Synthetic peptide
DIGIASVGWAVL

SEQ ID NO: 131 - protein, 12 aa, Artificial Sequence
  Synthetic peptide
DIGIASIGWAVI

SEQ ID NO: 132 - protein, 12 aa, Artificial Sequence
  Synthetic peptide
DIGIASVGWAII

SEQ ID NO: 133 - protein, 12 aa, Artificial Sequence
  Synthetic peptide
DVGIASVGWAVI

SEQ ID NO: 134 - protein, 11 aa, Artificial Sequence
  Synthetic peptide
DIGIASVGWAL

SEQ ID NO: 135 - protein, 12 aa, Artificial Sequence
  Synthetic peptide
DIGIASVGWAMV

SEQ ID NO: 136 - protein, 12 aa, Artificial Sequence
  Synthetic peptide
DIGIASVGWSVI

SEQ ID NO: 137 - protein, 12 aa, Artificial Sequence
  Synthetic peptide
DLGISSVGWSVI

SEQ ID NO: 138 - protein, 12 aa, Artificial Sequence
  Synthetic peptide
DIGITSVGWAVI

SEQ ID NO: 139 - protein, 12 aa, Artificial Sequence
  Synthetic peptide
DVGIGSIGWAVI

SEQ ID NO: 140 - protein, 12 aa, Artificial Sequence
  Synthetic peptide
DLGISSLGWAIV

SEQ ID NO: 141 - protein, 12 aa, Artificial Sequence
  Synthetic peptide
DLGVGSIGFAIV

SEQ ID NO: 142 - protein, 12 aa, Artificial Sequence
  Synthetic peptide
DIGYASIGWAVI

SEQ ID NO: 143 - protein, 12 aa, Artificial Sequence
  Synthetic peptide
DLGTNSIGWCLL

SEQ ID NO: 144 - protein, 12 aa, Artificial Sequence
  Synthetic peptide
DLGTNSIGWGLL

SEQ ID NO: 145 - protein, 12 aa, Artificial Sequence
  Synthetic peptide
DTGTNSLGWAIV

SEQ ID NO: 146 - protein, 12 aa, Artificial Sequence
  Synthetic peptide
DIGTDSLGWAVF

SEQ ID NO: 147 - protein, 12 aa, Artificial Sequence
  Synthetic peptide
DLGSTSLGWAIF

SEQ ID NO: 148 - protein, 12 aa, Artificial Sequence
  Synthetic peptide
DIGISSIGWAFS

SEQ ID NO: 149 - protein, 12 aa, Artificial Sequence
  Synthetic peptide
DLGIASVGWCLT

SEQ ID NO: 150 - protein, 12 aa, Artificial Sequence
  Synthetic peptide
DLGIASCGWGVV

SEQ ID NO: 151 - protein, 12 aa, Artificial Sequence
  Synthetic peptide
DIGSNSIGFAVV

SEQ ID NO: 152 - protein, 12 aa, Artificial Sequence
  Synthetic peptide
DIGTTSIGFSVI

SEQ ID NO: 153 - protein, 12 aa, Artificial Sequence
  Synthetic peptide
DIGITSVGYGLI

SEQ ID NO: 154 - protein, 12 aa, Artificial Sequence
  Synthetic peptide
DIGITSVGFGII

SEQ ID NO: 155 - protein, 12 aa, Artificial Sequence
  Synthetic peptide
DLGTTSIGFAHI

SEQ ID NO: 156 - protein, 12 aa, Artificial Sequence
  Synthetic peptide
DIGIGSVGVGIL

SEQ ID NO: 157 - protein, 12 aa, Artificial Sequence
  Synthetic peptide
DLGVGSIGVAVA

SEQ ID NO: 158 - protein, 12 aa, Artificial Sequence
  Synthetic peptide
DVGITSTGYAVL

SEQ ID NO: 159 - protein, 12 aa, Artificial Sequence
  Synthetic peptide
DLGITSFGYAIL

SEQ ID NO: 160 - protein, 12 aa, Artificial Sequence
  Synthetic peptide
DIGTSSIGWWLY

SEQ ID NO: 161 - protein, 12 aa, Artificial Sequence
  Synthetic peptide
DLGSNSLGWFVT

SEQ ID NO: 162 - protein, 12 aa, Artificial Sequence
  Synthetic peptide
DLGANSLGWFVV

SEQ ID NO: 163 - protein, 12 aa, Artificial Sequence
  Synthetic peptide
DIGNASVGWSAF

SEQ ID NO: 164 - protein, 12 aa, Artificial Sequence
  Synthetic peptide
DVGTNSCGWVAM

SEQ ID NO: 165 - protein, 12 aa, Artificial Sequence
  Synthetic peptide
DVGERSIGLAAV

SEQ ID NO: 166 - protein, 12 aa, Artificial Sequence
  Synthetic peptide
DVGLNSVGLAAV

SEQ ID NO: 167 - protein, 12 aa, Artificial Sequence
  Synthetic peptide
DVGLMSVGLAAI

SEQ ID NO: 168 - protein, 12 aa, Artificial Sequence
  Synthetic peptide
DVGTFSVGLAAI

SEQ ID NO: 169 - protein, 12 aa, Artificial Sequence
  Synthetic peptide
DIGTGSVGYACM

SEQ ID NO: 170 - protein, 12 aa, Artificial Sequence
  Synthetic peptide
DLGTNSIGSSVR

SEQ ID NO: 171 - protein, 15 aa, Artificial Sequence
  Synthetic peptide
DIGLRIGITSCGWSI

SEQ ID NO: 172 - protein, 12 aa, Artificial Sequence
  Synthetic peptide
DMGAKYTGVFYA

SEQ ID NO: 173 - protein, 12 aa, Artificial Sequence
  Synthetic peptide
DLGGKNTGFFSF

SEQ ID NO: 174 - protein, 12 aa, Artificial Sequence
  Synthetic peptide
DLGVKNTGVFSA

SEQ ID NO: 175 - protein, 12 aa, Artificial Sequence
  Synthetic peptide
DLGAKFTGVALY

SEQ ID NO: 176 - protein, 12 aa, Artificial Sequence
  Synthetic peptide
DLGGKFTGVCLS

SEQ ID NO: 177 - protein, 12 aa, Artificial Sequence
  Synthetic peptide
DLGGTYTGTFIT

SEQ ID NO: 178 - protein, 28 aa, Artificial Sequence
  Synthetic peptide
YDIDHIYPRSLTKDDSFDNLVLCERTAN

SEQ ID NO: 179 - protein, 28 aa, Artificial Sequence
  Synthetic peptide
DIDHIYPRSKVIKDDSFDNLVLVLKNEN

SEQ ID NO: 180 - protein, 27 aa, Artificial Sequence
  Synthetic peptide
DRDHIYPQSKIKDDSIDNLVLVNKTYN

SEQ ID NO: 181 - protein, 27 aa, Artificial Sequence
  Synthetic peptide
DIDHIYPRSKIKDDSITNRVLVEKDIN

SEQ ID NO: 182 - protein, 27 aa, Artificial Sequence
  Synthetic peptide
DIDHIYPQSKIKDDSISNRVLVCSSCN

SEQ ID NO: 183 - protein, 27 aa, Artificial Sequence
  Synthetic peptide
DIDHIYPQSKTMDDSLNNRVLVKKNYN

SEQ ID NO: 184 - protein, 27 aa, Artificial Sequence
  Synthetic peptide
DQDHIYPKSKIYDDSLENRVLVKKNLN

SEQ ID NO: 185 - protein, 27 aa, Artificial Sequence
  Synthetic peptide
QIDHIVPQSLVKDDSFDNRVLVVPSEN

SEQ ID NO: 186 - protein, 27 aa, Artificial Sequence
  Synthetic peptide
DIDHIIPQAFIKDNSIDNRVLTSSKEN

SEQ ID NO: 187 - protein, 27 aa, Artificial Sequence
  Synthetic peptide
DIDHIIPQAFLKDNSIDNKVLVSSASN

SEQ ID NO: 188 - protein, 27 aa, Artificial Sequence
  Synthetic peptide
DIDHIIPQAYTKDNSLDNRVLVSNITN

SEQ ID NO: 189 - protein, 27 aa, Artificial Sequence
  Synthetic peptide
DIDHIVPQSFITDNSIDNLVLTSSAGN

SEQ ID NO: 190 - protein, 27 aa, Artificial Sequence
  Synthetic peptide
DVDHIVPQSFLKDDSIDNKVLTRSDKN

SEQ ID NO: 191 - protein, 27 aa, Artificial Sequence
  Synthetic peptide
NIDHIYPQSMVKDDSLDNKVLVQSEIN

SEQ ID NO: 192 - protein, 27 aa, Artificial Sequence
  Synthetic peptide
DIDHILPQSLIKDDSLDNRVLVNATIN

SEQ ID NO: 193 - protein, 27 aa, Artificial Sequence
  Synthetic peptide
DIDHILPQSFIKDDSLENRVLVKKAVN

SEQ ID NO: 194 - protein, 27 aa, Artificial Sequence
  Synthetic peptide
EVDHIFPRSFIKDDSIDNKVLVIKKMN

SEQ ID NO: 195 - protein, 27 aa, Artificial Sequence
  Synthetic peptide
EVDHIIPRSYIKDDSFENKVLVYREEN

SEQ ID NO: 196 - protein, 27 aa, Artificial Sequence
  Synthetic peptide
DIDHIIPQAVTQNDSIDNRVLVARAEN

SEQ ID NO: 197 - protein, 27 aa, Artificial Sequence
  Synthetic peptide
EIDHIIPYSISFDDSSSNKLLVLAESN

SEQ ID NO: 198 - protein, 27 aa, Artificial Sequence
  Synthetic peptide
EIDHIIPYSLCFDDSSANKVLVHKQSN

SEQ ID NO: 199 - protein, 27 aa, Artificial Sequence
  Synthetic peptide
DIDHIIPYSRSMDDSYSNKVLVLSGEN

SEQ ID NO: 200 - protein, 27 aa, Artificial Sequence
  Synthetic peptide
DIDHIIPYSKSMDDSFNNKVLCLAEEN

SEQ ID NO: 201 - protein, 27 aa, Artificial Sequence
  Synthetic peptide
EIDHIYPYSRSFDDSYMNKVLVFTKQN

SEQ ID NO: 202 - protein, 27 aa, Artificial Sequence
  Synthetic peptide
QIDHIYPYSRSMDDSYMNKVLVLTDEN

SEQ ID NO: 203 - protein, 27 aa, Artificial Sequence
  Synthetic peptide
EIDHIIPFSRSFDDSLSNKILVLGSEN

SEQ ID NO: 204 - protein, 27 aa, Artificial Sequence
  Synthetic peptide
EIDHALPFSRTWDDSFNNKVLVLGSEN

SEQ ID NO: 205 - protein, 27 aa, Artificial Sequence
  Synthetic peptide
EIDHALPFSRTWDDSFNNKVLVLASEN

SEQ ID NO: 206 - protein, 27 aa, Artificial Sequence
  Synthetic peptide
EIDHIIPISISLDDSINNKVLVLSKAN

SEQ ID NO: 207 - protein, 27 aa, Artificial Sequence
  Synthetic peptide
EVDHIIPISISLDDSITNKVLVTHREN

SEQ ID NO: 208 - protein, 27 aa, Artificial Sequence
  Synthetic peptide
QVDHALPYSRSYDDSKNNKVLVLTHEN

SEQ ID NO: 209 - protein, 27 aa, Artificial Sequence
  Synthetic peptide
EVDHILPLSITFDDSLANKVLVYATAN

SEQ ID NO: 210 - protein, 27 aa, Artificial Sequence
  Synthetic peptide
EIDHIIPRSISFDDARSNKVLVYRSEN

SEQ ID NO: 211 - protein, 27 aa, Artificial Sequence
  Synthetic peptide
EVDHIIPRSVSFDNSYHNKVLVKQSEN

SEQ ID NO: 212 - protein, 27 aa, Artificial Sequence
  Synthetic peptide
DIDHILPYSITFDDSFRNKVLVTSQEN

SEQ ID NO: 213 - protein, 27 aa, Artificial Sequence
  Synthetic peptide
EIDHILPRSRSADDSFANKVLCLARAN

SEQ ID NO: 214 - protein, 27 aa, Artificial Sequence
  Synthetic peptide
EIEHLLPFSLTLDDSMANKTVCFRQAN

SEQ ID NO: 215 - protein, 27 aa, Artificial Sequence
  Synthetic peptide
DIDHILPFSVSLDDSAANKVVCLREAN

SEQ ID NO: 216 - protein, 27 aa, Artificial Sequence
  Synthetic peptide
DIDHLIPFSISWDDSAANKVVCMRYAN

SEQ ID NO: 217 - protein, 27 aa, Artificial Sequence
  Synthetic peptide
DIDHILPVAMTLDDSPANKIICMRYAN

SEQ ID NO: 218 - protein, 27 aa, Artificial Sequence
  Synthetic peptide
DVDHILPYSRTLDDSFPNRTLCLREAN

SEQ ID NO: 219 - protein, 27 aa, Artificial Sequence
  Synthetic peptide
EIEHILPFSRTLDDSLNNRTVAMRRAN

SEQ ID NO: 220 - protein, 27 aa, Artificial Sequence
  Synthetic peptide
EVDHIIPYSISWDDSYTNKVLTSAKCN

SEQ ID NO: 221 - protein, 27 aa, Artificial Sequence
  Synthetic peptide
QVDHILPWSRFGDDSYLNKTLCTARSN

SEQ ID NO: 222 - protein, 27 aa, Artificial Sequence
  Synthetic peptide
QVDHILPFSKTLDDSFANKVLAQHDAN

SEQ ID NO: 223 - protein, 27 aa, Artificial Sequence
  Synthetic peptide
QIDHAFPLSRSLDDSQSNKVLCLTSSN

SEQ ID NO: 224 - protein, 27 aa, Artificial Sequence
  Synthetic peptide
DIDHIVPRSISFDDSFSNLVIVNKLDN

SEQ ID NO: 225 - protein, 27 aa, Artificial Sequence
  Synthetic peptide
EIEHIIPYSMSYDNSQANKILTEKAEN

SEQ ID NO: 226 - protein, 27 aa, Artificial Sequence
  Synthetic peptide
EIDHVIPYSKSADDSWFNKLLVKKSTN

SEQ ID NO: 227 - protein, 27 aa, Artificial Sequence
  Synthetic peptide
EMDHILPYSRSLDNGWHNRVLVHGKDN

SEQ ID NO: 228 - protein, 27 aa, Artificial Sequence
  Synthetic peptide
EVDHIVPYSLILDNTINNKALVYAEEN

SEQ ID NO: 229 - protein, 27 aa, Artificial Sequence
  Synthetic peptide
EIEHVIPQSLYFDDSFSNKVICEAEVN

SEQ ID NO: 230 - protein, 27 aa, Artificial Sequence
  Synthetic peptide
DIEHIIPQARLFDDSFSNKTLEARSVN

SEQ ID NO: 231 - protein, 27 aa, Artificial Sequence
  Synthetic peptide
EIEHIVPKARVFDDSFSNKTLTFHRIN

SEQ ID NO: 232 - protein, 28 aa, Artificial Sequence
  Synthetic peptide
DKDHIIPQSMKKDDSIINNLVLVNKNAN

SEQ ID NO: 233 - protein, 27 aa, Artificial Sequence
  Synthetic peptide
EVEHIWPRSRSFDNSPRNKTLCRKDVN

SEQ ID NO: 234 - protein, 27 aa, Artificial Sequence
  Synthetic peptide
IVNHIIPYNRSFDDTYHNRVLTLTETK

SEQ ID NO: 235 - protein, 27 aa, Artificial Sequence
  Synthetic peptide
DMEHTIPKSISFDNSDQNLTLCESYYN

SEQ ID NO: 236 - protein, 27 aa, Artificial Sequence
  Synthetic peptide
DIEHTIPRSAGGDSTKMNLTLCSSRFN

SEQ ID NO: 237 - protein, 27 aa, Artificial Sequence
  Synthetic peptide
DIEHTIPRSISQDNSQMNKTLCSLKFN

SEQ ID NO: 238 - protein, 27 aa, Artificial Sequence
  Synthetic peptide
DIDHVIPLARGGRDSLDNMVLCQSDAN

SEQ ID NO: 239 - protein, 27 aa, Artificial Sequence
  Synthetic peptide
DIEHLFPIAESEDNGRNNLVISHSACN

SEQ ID NO: 240 - protein, 27 aa, Artificial Sequence
  Synthetic peptide
DVDHIFPRDDTADNSYGNKVVAHRQCN

SEQ ID NO: 241 - protein, 27 aa, Artificial Sequence
  Synthetic peptide
DIEHIVPQSLGGLSTDYNTIVTLKSVN

SEQ ID NO: 242 - protein, 27 aa, Artificial Sequence
  Synthetic peptide
ELDHIVPRTDGGSNRHENLAITCGACN

SEQ ID NO: 243 - protein, 28 aa, Artificial Sequence
  Synthetic peptide
EMDHIVPRKGVGSTNTRTNFAAVCAECN

SEQ ID NO: 244 - protein, 28 aa, Artificial Sequence
  Synthetic peptide
EMDHIVPRKGVGSTNTRVNLAAACAACN

SEQ ID NO: 245 - protein, 28 aa, Artificial Sequence
  Synthetic peptide
EMDHIVPRAGQGSTNTRENLVAVCHRCN

SEQ ID NO: 246 - protein, 33 aa, Artificial Sequence
  Synthetic polypeptide
EIDHILPRSLIKDARGIVFNAEPNLIYASSRGN

SEQ ID NO: 247 - protein, 33 aa, Artificial Sequence
  Synthetic polypeptide
EIDHIIPRSLTGRTKKTVFNSEANLIYCSSKGN

SEQ ID NO: 248 - protein, 33 aa, Artificial Sequence
  Synthetic polypeptide
EIDHIIPRSLTLKKSESIYNSEVNLIFVSAQGN

SEQ ID NO: 249 - protein, 33 aa, Artificial Sequence
  Synthetic polypeptide
EIDHIYPRSLSKKHFGVIFNSEVNLIYCSSQGN

SEQ ID NO: 250 - protein, 33 aa, Artificial Sequence
  Synthetic polypeptide
EIDHILPRSHTLKIYGTVFNPEGNLIYVHQKCN

SEQ ID NO: 251 - protein, 30 aa, Artificial Sequence
  Synthetic polypeptide
ELDHIIPRSHKKYGTLNDEANLICVTRGDN

SEQ ID NO: 252 - protein, 27 aa, Artificial Sequence
  Synthetic peptide
ELEHIVPHSFRQSNALSSLVLTWPGVN

SEQ ID NO: 253 - protein, 28 aa, Artificial Sequence
  Synthetic peptide
YDIDHIYPRSLTKDDSFDNLVLCERTAN

SEQ ID NO: 254 - protein, 28 aa, Artificial Sequence
  Synthetic peptide
DIDHIYPRSKVIKDDSFDNLVLVLKNEN

SEQ ID NO: 255 - protein, 27 aa, Artificial Sequence
  Synthetic peptide
DRDHIYPQSKIKDDSIDNLVLVNKTYN

SEQ ID NO: 256 - protein, 27 aa, Artificial Sequence
  Synthetic peptide
DIDHIYPRSKIKDDSITNRVLVEKDIN

SEQ ID NO: 257 - protein, 27 aa, Artificial Sequence
  Synthetic peptide
DIDHIYPQSKIKDDSISNRVLVCSSCN

SEQ ID NO: 258 - protein, 27 aa, Artificial Sequence
  Synthetic peptide
DIDHIYPQSKTMDDSLNNRVLVKKNYN

SEQ ID NO: 259 - protein, 27 aa, Artificial Sequence
  Synthetic peptide
DQDHIYPKSKIYDDSLENRVLVKKNLN

SEQ ID NO: 260 - protein, 27 aa, Artificial Sequence
  Synthetic peptide
QIDHIVPQSLVKDDSFDNRVLVVPSEN

SEQ ID NO: 261 - protein, 27 aa, Artificial Sequence
  Synthetic peptide
DIDHIIPQAFIKDNSIDNRVLTSSKEN

SEQ ID NO: 262 - protein, 27 aa, Artificial Sequence
  Synthetic peptide
DIDHIIPQAFLKDNSIDNKVLVSSASN

SEQ ID NO: 263 - protein, 27 aa, Artificial Sequence
  Synthetic peptide
DIDHIIPQAYTKDNSLDNRVLVSNITN

SEQ ID NO: 264 - protein, 27 aa, Artificial Sequence
  Synthetic peptide
DIDHIVPQSFITDNSIDNLVLTSSAGN

SEQ ID NO: 265 - protein, 27 aa, Artificial Sequence
  Synthetic peptide
DVDHIVPQSFLKDDSIDNKVLTRSDKN

SEQ ID NO: 266 - protein, 27 aa, Artificial Sequence
  Synthetic peptide
NIDHIYPQSMVKDDSLDNKVLVQSEIN

SEQ ID NO: 267 - protein, 27 aa, Artificial Sequence
  Synthetic peptide
DIDHILPQSLIKDDSLDNRVLVNATIN

SEQ ID NO: 268 - protein, 27 aa, Artificial Sequence
  Synthetic peptide
DIDHILPQSFIKDDSLENRVLVKKAVN

SEQ ID NO: 269 - protein, 27 aa, Artificial Sequence
  Synthetic peptide
EVDHIFPRSFIKDDSIDNKVLVIKKMN

SEQ ID NO: 270 - protein, 27 aa, Artificial Sequence
  Synthetic peptide
EVDHIIPRSYIKDDSFENKVLVYREEN

SEQ ID NO: 271 - protein, 27 aa, Artificial Sequence
  Synthetic peptide
DIDHIIPQAVTQNDSIDNRVLVARAEN

SEQ ID NO: 272 - protein, 27 aa, Artificial Sequence
  Synthetic peptide
DIDHIVPRSISFDDSFSNLVIVNKLDN

SEQ ID NO: 273 - protein, 27 aa, Artificial Sequence
  Synthetic peptide
EIDHIIPYSISFDDSSSNKLLVLAESN

SEQ ID NO: 274 - protein, 27 aa, Artificial Sequence
  Synthetic peptide
EIDHIIPYSLCFDDSSANKVLVHKQSN

SEQ ID NO: 275 - protein, 27 aa, Artificial Sequence
  Synthetic peptide
EIDHIIPISISLDDSINNKVLVLSKAN

SEQ ID NO: 276 - protein, 27 aa, Artificial Sequence
  Synthetic peptide
EVDHIIPISISLDDSITNKVLVTHREN

SEQ ID NO: 277 - protein, 27 aa, Artificial Sequence
  Synthetic peptide
EVDHILPLSITFDDSLANKVLVYATAN

SEQ ID NO: 278 - protein, 27 aa, Artificial Sequence
  Synthetic peptide
EIDHIIPRSISFDDARSNKVLVYRSEN

SEQ ID NO: 279 - protein, 27 aa, Artificial Sequence
  Synthetic peptide
EVDHIIPRSVSFDNSYHNKVLVKQSEN

SEQ ID NO: 280 - protein, 27 aa, Artificial Sequence
  Synthetic peptide
EVDHIIPYSISWDDSYTNKVLTSAKCN

SEQ ID NO: 281 - protein, 27 aa, Artificial Sequence
  Synthetic peptide
DIDHIIPYSRSMDDSYSNKVLVLSGEN

SEQ ID NO: 282 - protein, 27 aa, Artificial Sequence
  Synthetic peptide
EIEHIIPYSMSYDNSQANKILTEKAEN

SEQ ID NO: 283 - protein, 27 aa, Artificial Sequence
  Synthetic peptide
EVDHIVPYSLILDNTINNKALVYAEEN

SEQ ID NO: 284 - protein, 27 aa, Artificial Sequence
  Synthetic peptide
EIDHVIPYSKSADDSWFNKLLVKKSTN

SEQ ID NO: 285 - protein, 27 aa, Artificial Sequence
  Synthetic peptide
EMDHILPYSRSLDNGWHNRVLVHGKDN

SEQ ID NO: 286 - protein, 27 aa, Artificial Sequence
  Synthetic peptide
EIEHVIPQSLYFDDSFSNKVICEAEVN

SEQ ID NO: 287 - protein, 27 aa, Artificial Sequence
  Synthetic peptide
DIEHIIPQARLFDDSFSNKTLEARSVN

SEQ ID NO: 288 - protein, 27 aa, Artificial Sequence
  Synthetic peptide
EIEHIVPKARVFDDSFSNKTLTFHRIN

SEQ ID NO: 289 - protein, 28 aa, Artificial Sequence
  Synthetic peptide
DKDHIIPQSMKKDDSIINNLVLVNKNAN

SEQ ID NO: 290 - protein, 27 aa, Artificial Sequence
  Synthetic peptide
QVDHILPWSRFGDDSYLNKTLCTARSN

SEQ ID NO: 291 - protein, 27 aa, Artificial Sequence
  Synthetic peptide
DIDHVIPLARGGRDSLDNMVLCQSDAN

SEQ ID NO: 292 - protein, 27 aa, Artificial Sequence
  Synthetic peptide
DMEHTIPKSISFDNSDQNLTLCESYYN

SEQ ID NO: 293 - protein, 27 aa, Artificial Sequence
  Synthetic peptide
DIEHTIPRSAGGDSTKMNLTLCSSRFN

SEQ ID NO: 294 - protein, 27 aa, Artificial Sequence
  Synthetic peptide
DIEHTIPRSISQDNSQMNKTLCSLKFN

SEQ ID NO: 295 - protein, 27 aa, Artificial Sequence
  Synthetic peptide
DIEHLFPIAESEDNGRNNLVISHSACN

SEQ ID NO: 296 - protein, 27 aa, Artificial Sequence
  Synthetic peptide
DVDHIFPRDDTADNSYGNKVVAHRQCN

SEQ ID NO: 297 - protein, 27 aa, Artificial Sequence
  Synthetic peptide
DIEHIVPQSLGGLSTDYNTIVTLKSVN

SEQ ID NO: 298 - protein, 27 aa, Artificial Sequence
  Synthetic peptide
ELDHIVPRTDGGSNRHENLAITCGACN

SEQ ID NO: 299 - protein, 28 aa, Artificial Sequence
  Synthetic peptide
EMDHIVPRKGVGSTNTRTNFAAVCAECN

SEQ ID NO: 300 - protein, 28 aa, Artificial Sequence
  Synthetic peptide
EMDHIVPRKGVGSTNTRVNLAAACAACN

SEQ ID NO: 301 - protein, 28 aa, Artificial Sequence
  Synthetic peptide
EMDHIVPRAGQGSTNTRENLVAVCHRCN

SEQ ID NO: 302 - protein, 27 aa, Artificial Sequence
  Synthetic peptide
ELEHIVPHSFRQSNALSSLVLTWPGVN

SEQ ID NO: 303 - DNA, 3333 bp, Artificial Sequence
  Synthetic polynucleotide
atggtgcctaagaagaagagaaaggtggctgccttcaaacctaattcaatcaactacatcctcggcctcgatatcggcatcgcatccgtcggctgggcgatggtagaaattgacgaagaagaaaaccccatccgcctgattgatttgggcgtgcgcgtatttgagcgtgccgaagtaccgaaaacaggcgactcccttgccatggcaaggcgtttggcgcgcagtgttcgccgcctgacccgccgtcgcgcccaccgcctgcttcggacccgccgcctattgaaacgcgaaggcgtattacaagccgccaattttgacgaaaacggcttgattaaatccttaccgaatacaccatggcaacttcgcgcagccgcattagaccgcaaactgacgcctttagagtggtcggcagtcttgttgcatttaatcaaacatcgcggctatttatcgcaacggaaaaacgagggcgaaactgccgataaggagcttggcgctttgcttaaaggcgtagccggcaatgcccatgccttacagacaggcgatttccgcacaccggccgaattggctttaaataaatttgagaaagaaagcggccatatccgcaatcagcgcagcgattattcgcatacgttcagccgcaaagatttacaggcggagctgattttgctgtttgaaaaacaaaaagaatttggcaatccgcatgtttcaggcggccttaaagaaggtattgaaaccctactgatgacgcaacgccctgccctgtccggcgatgccgttcaaaaaatgttggggcattgcaccttcgaaccggcagagccgaaagccgctaaaaacacctacacagccgaacgtttcatctggctgaccaagctgaacaacctgcgtattttagagcaaggcagcgagcggccattgaccgataccgaacgcgccacgcttatggacgagccatacagaaaatccaaactgacttacgcacaagcccgtaagctgctgggtttagaagataccgcctttttcaaaggcttgcgctatggtaaagacaatgccgaagcctcaacattgatggaaatgaaggcctaccatgccatcagccgtgcactggaaaaagaaggattgaaagacaaaaaatccccattaaacctttctcccgaattacaagacgaaatcggcacggcattctccctgttcaaaaccgatgaagacattacaggccgtctgaaagaccgtatacagcccgaaatcttagaagcgctgttgaaacacatcagcttcgataagttcgtccaaatttccttgaaagcattgcgccgaattgtgcctctaatggaacaaggcaaacgttacgatgaagcctgcgccgaaatctacggagaccattacggcaagaagaatacggaagaaaagatttatctgccgccgattcccgccgacgaaatccgcaaccccgtcgtcttgcgcgccttatctcaagcacgtaaggtcattaacggcgtggtacgccgttacggctccccagctcgtatccatattgaaactgcaagggaagtaggtaaatcgtttaaagaccgcaaagaaattgagaaacgccaagaagaaaaccgcaaagaccgggaaaaagccgccgccaaattccgagagtatttccccaattttgtcggagaacccaaatccaaagatattctgaaactgcgcctgtacgagcaacaacacggcaaatgcctgtattcgggcaaagaaatcaacttaggccgtctgaacgaaaaaggctatgtcgaaatcgaccatgccctgccgttctcgcgcacatgggacgacagtttcaacaataaagtactggtattgggcagcgaaaaccaaaacaaaggcaatcaaaccccttacgaatacttcaacggcaaagacaacagccgcgaatggcaggaatttaaagcgcgtgtcgaaaccagccgtttcccgcgcagtaaaaaacaacggattctgctgcaaaaattcgatgaagacggctttaaagaacgcaatctgaacgacacgcgctacgtcaaccgtttcctgtgtcaatttgttgccgaccgtatgcggctgacaggtaaaggcaagaaacgtgtctttgcatccaacggacaaattaccaatctgttgcgcggcttttggggattgcgcaaagtgcgtgcggaaaacgaccgccatcacgccttggacgccgtcgtcgttgcctgctcgaccgttgccatgcagcagaaaattacccgttttgtacgctataaagagatgaacgcgtttgacggtaaaaccatagacaaagaaacaggagaagtgctgcatcaaaaaacacacttcccacaaccttgggaatttttcgcacaagaagtcatgattcgcgtcttcggcaaaccggacggcaaacccgaattcgaagaagccgataccctagaaaaactgcgcacgttgcttgccgaaaaattatcatctcgccccgaagccgtacacgaatacgttacgccactgtttgtttcacgcgcgcccaatcggaagatgagcgggcaagggcatatggagaccgtcaaatccgccaaacgactggacgaaggcgtcagcgtgttgcgcgtaccgctgacacagttaaaactgaaagacttggaaaaaatggtcaatcgggagcgcgaacctaagctatacgaagcactgaaagcacggctggaagcacataaagacgatcctgccaaagcctttgccgagccgttttacaaatacgataaagcaggcaaccgcacccaacaggtaaaagccgtacgcgtagagcaagtacagaaaaccggcgtatgggtgcgcaaccataacggtattgccgacaacgcaaccatggtgcgcgtagatgtgtttgagaaaggcgacaagtattatctggtaccgatttacagttggcaggtagcgaaagggattttgccggatagggctgttgtacaaggaaaagatgaagaagattggcaacttattgatgatagtttcaactttaaattctcattacaccctaatgatttagtcgaggttataacaaaaaaagctagaatgtttggttactttgccagctgccatcgaggcacaggtaatatcaatatacgcattcatgatcttgatcataaaattggcaaaaatggaatactggaaggtatcggcgtcaaaaccgccctttcattccaaaaataccaaattgacgaactgggcaaagaaatcagaccatgccgtctgaaaaaacgcccgcctgtccgttacccatacgatgttccagattacgctgcagctccagcagcgaagaaaaagaagctggattaa

SEQ ID NO: 304 - protein, 1053 aa, Staphylococcus aureus; identical to SEQ ID NO: 26

SEQ ID NO: 305 - protein, 1368 aa, Streptococcus pyogenes [sequence omitted]

SEQ ID NO: 306 - protein, 984 aa, Campylobacter jejuni
MARILAFDIGISSIGWAFSENDELKDCGVRIFTKVENPKTGESLALPRRLARSARKRLARRKARLNHLKHLIANEFKLNYEDYQSFDESLAKAYKGSLISPYELRFRALNELLSKQDFARVILHIAKRRGYDDIKNSDDKEKGAILKAIKQNEEKLANYQSVGEYLYKEYFQKFKENSKEFTNVRNKKESYERCIAQSFLKDELKLIFKKQREFGFSFSKKFEEEVLSVAFYKRALKDFSHLVGNCSFFTDEKRAPKNSPLAFMFVALTRIINLLNNLKNTEGILYTKDDLNALLNEVLKNGTLTYKQTKKLLGLSDDYEFKGEKGTYFIEFKKYKEFIKALGEHNLSQDDLNEIAKDITLIKDEIKLKKALAKYDLNQNQIDSLSKLEFKDHLNISFKALKLVTPLMLEGKKYDEACNELNLKVAINEDKKDFLPAFNETYYKDEVTNPVVLRAIKEYRKVLNALLKKYGKVHKINIELAREVGKNHSQRAKIEKEQNENYKAKKDAELECEKLGLKINSKNILKLRLFKEQKEFCAYSGEKIKISDLQDEKMLEIDHIYPYSRSFDDSYMNKVLVFTKQNQEKLNQTPFEAFGNDSAKWQKIEVLAKNLPTKKQKRILDKNYKDKEQKNFKDRNLNDTRYIARLVLNYTKDYLDFLPLSDDENTKLNDTQKGSKVHVEAKSGMLTSALRHTWGFSAKDRNNHLHHAIDAVIIAYANNSIVKAFSDFKKEQESNSAELYAKKISELDYKNKRKFFEPFSGFRQKVLDKIDEIFVSKPERKKPSGALHEETFRKEEEFYQSYGGKEGVLKALELGKIRKVNGKIVKNGDMFRVDIFKHKKTNKFYAVPIYTMDFALKVLPNKAVARSKKGEIKDWILMDENYEFCFSLYKDSLILIQTKDMQEPEFVYYNAFTSSTVSLIVSKHDNKFETLSKNQKILFKNANEKEVIAKSIGIQNLKVFEKYIVSALGEVTKAEFRQREDFKK

SEQ ID NO: 307 - protein, 1436 aa, Bacteroides fragilis
MKRILGLDLGTNSIGWALVNEAENKDERSSIVKLGVRVNPLTVDELTNFEKGKSITTNADRTLKRGMRRNLQRYKLRRETLTEVLKEHKLITEDTILSENGNRTTFETYRLRAKAVTEEISLEEFARVLLMINKKRGYKSSRKAKGVEEGTLIDGMDIARELYNNNLTPGELCLQLLDAGKKFLPDFYRSDLQNELDRIWEKQKEYYPEILTDVLKEELRGKKRDAVWAICAKYFVWKENYTEWNKEKGKTEQQEREHKLEGIYSKRKRDEAKRENLQWRVNGLKEKLSLEQLVIVFQEMNTQINNSSGYLGAISDRSKELYFNKQTVGQYQMEMLDKNPNASLRNMVFYRQDYLDEFNMLWEKQAVYHKELTEELKKEIRDIIIFYQRRLKSQKGLIGFCEFESRQIEVDIDGKKKIKTVGNRVISRSSPLFQEFKIWQILNNIEVTVVGKKRKRRKLKENYSALFEELNDAEQLELNGSRRLCQEEKELLAQELFIRDKMTKSEVLKLLFDNPQELDLNFKTIDGNKTGYALFQAYSKMIEMSGHEPVDFKKPVEKVVEYIKAVFDLLNWNTDILGFNSNEELDNQPYYKLWHLLYSFEGDNTPTGNGRLIQKMTELYGFEKEYATILANVSFQDDYGSLSAKAIHKILPHLKEGNRYDVACVYAGYRHSESSLTREEIANKVLKDRLMLLPKNSLHNPVVEKILNQMVNVINVIIDIYGKPDEIRVELARELKKNAKEREELTKSIAQTTKAHEEYKTLLQTEFGLTNVSRTDILRYKLYKELESCGYKTLYSNTYISREKLFSKEFDIEHIIPQARLFDDSFSNKTLEARSVNIEKGNKTAYDFVKEKFGESGADNSLEHYLNNIEDLFKSGKISKTKYNKLKMAEQDIPDGFIERDLRNTQYIAKKALSMLNEISHRVVATSGSVTDKLREDWQLIDVMKELNWEKYKALGLVEYFEDRDGRQIGRIKDWTKRNDHRHHAMDALTVAFTKDVFIQYFNNKNASLDPNANEHAIKNKYFQNGRAIAPMPLREFRAEAKKHLENTLISIKAKNKVITGNINKTRKKGGVNKNMQQTPRGQLHLETIYGSGKQYLTKEEKVNASFDMRKIGTVSKSAYRDALLKRLYENDNDPKKAFAGKNSLDKQPIWLDKEQMRKVPEKVKIVTLEAIYTIRKEISPDLKVDKVIDVGVRKILIDRLNEYGNDAKKAFSNLDKNPIWLNKEKGISIKRVTISGISNAQSLHVKKDKDGKPILDENGRNIPVDFVNTGNNHHVAVYYRPVIDKRGQLVVDEAGNPKYELEEVVVSFFEAVTRANLGLPIIDKDYKTTEGWQFLFSMKQNEYFVFPNEKTGFNPKEIDLLDVENYGLISPNLFRVQKFSLKNYVFRHHLETTIKDTSSILRGITWIDFRSSKGLDTIVKVRVNHIGQIVSVGEY

SEQ ID NO: 308 - protein, 1420 aa, Bifidobacterium bifidum
MSRKNYVDDYAISLDIGNASVGWSAFTPNYRLVRAKGHELIGVRLFDPADTAESRRMARTTRRRYSRRRWRLRLLDALFDQALSEIDPSFLARRKYSWVHPDDENNADCWYGSVLFDSNEQDKRFYEKYPTIYHLRKALMEDDSQHDIREIYLAIHHMVKYRGNFLVEGTLESSNAFKEDELLKLLGRITRYEMSEGEQNSDIEQDDENKLVAPANGQLADALCATRGSRSMRVDNALEALSAVNDLSREQRAIVKAIFAGLEGNKLDLAKIFVSKEFSSENKKILGIYFNKSDYEEKCVQIVDSGLLDDEEREFLDRMQGQYNAIALKQLLGRSTSVSDSKCASYDAHRANWNLIKLQLRTKENEKDINENYGILVGWKIDSGQRKSVRGESAYENMRKKANVFFKKMIETSDLSETDKNRLIHDIEEDKLFPIQRDSDNGVIPHQLHQNELKQIIKKQGKYYPFLLDAFEKDGKQINKIEGLLTFRVPYFVGPLVVPEDLQKSDNSENHWMVRKKKGEITPWNFDEMVDKDASGRKFIERLVGTDSYLLGEPTLPKNSLLYQEYEVLNELNNVRLSVRTGNHWNDKRRMRLGREEKTLLCQRLFMKGQTVTKRTAENLLRKEYGRTYELSGLSDESKFTSSLSTYGKMCRIFGEKYVNEHRDLMEKIVELQTVFEDKETLLHQLRQLEGISEADCALLVNTHYTGWGRLSRKLLTTKAGECKISDDFAPRKHSIIEIMRAEDRNLMEIITDKQLGFSDWIEQENLGAENGSSLMEVVDDLRVSPKVKRGIIQSIRLIDDISKAVGKRPSRIFLELADDIQPSGRTISRKSRLQDLYRNANLGKEFKGIADELNACSDKDLQDDRLFLYYTQLGKDMYTGEELDLDRLSSAYDIDHIIPQAVTQNDSIDNRVLVARAENARKTDSFTYMPQIADRMRNFWQILLDNGLISRVKFERLTRQNEFSEREKERFVQRSLVETRQIMKNVATLMRQRYGNSAAVIGLNAELTKEMHRYLGFSHKNRDINDYHHAQDALCVGIAGQFAANRGFFADGEVSDGAQNSYNQYLRDYLRGYREKLSAEDRKQGRAFGFIVGSMRSQDEQKRVNPRTGEVVWSEEDKDYLRKVMNYRKMLVTQKVGDDFGALYDETRYAATDPKGIKGIPFDGAKQDTSLYGGFSSAKPAYAVLIESKGKTRLVNVTMQEYSLLGDRPSDDELRKVLAKKKSEYAKANILLRHVPKMQLIRYGGGLMVIKSAGELNNAQQLWLPYEEYCYFDDLSQGKGSLEKDDLKKLLDSILGSVQCLYPWHRFTEEELADLHVAFDKLPEDEKKNVITGIVSALHADAKTANLSIVGMTGSWRRMNNKSGYTFSDEDEFIFQSPSGLFEKRVTVGELKRKAKKEVNSKYRTNEKRLPTLSGASQP

SEQ ID NO: 309 - protein, 1397 aa, Veillonella atypica
METQTSNQLITSHLKDYPKQDYFVGLDIGTNSVGWAVTNTSYELLKFHSHKMWGSRLFEEGESAVTRRGFRSMRRRLERRKLRLKLLEELFADAMAQVDSTFFIRLHESKYHYEDKTTGHSSKHILFIDEDYTDQDYFTEYPTIYHLRKDLMENGTDDIRKLFLAVHHILKYRGNFLYEGATFNSNAFTFEDVLKQALVNITFNCFDTNSAISSISNILMESGKTKSDKAKAIERLVDTYTVFDEVNTPDKPQKEQVKEDKKTLKAFANLVLGLSANLIDLFGSVEDIDDDLKKLQIVGDTYDEKRDELAKVWGDEIHIIDDCKSVYDAIILMSIKEPGLTISQSKVKAFDKHKEDLVILKSLLKLDRNVYNEMFKSDKKGLHNYVHYIKQGRTEETSCSREDFYKYTKKIVEGLADSKDKEYILNEIELQTLLPLQRIKDNGVIPYQLHLEELKVILDKCGPKFPFLHTVSDGFSVTEKLIKMLEFRIPYYVGPLNTHHNIDNGGFSWAVRKQAGRVTPWNFEEKIDREKSAAAFIKNLTNKCTYLFGEDVLPKSSLLYSEFMLLNELNNVRIDGKALAQGVKQHLIDSIFKQDHKKMTKNRIELFLKDNNYITKKHKPEITGLDGEIKNDLTSYRDMVRILGNNFDVSMAEDIITDITIFGESKKMLRQTLRNKFGSQLNDETIKKLSKLRYRDWGRLSKKLLKGIDGCDKAGNGAPKTIIELMRNDSYNLMEILGDKFSFMECIEEENAKLAQGQVVNPHDIIDELALSPAVKRAVWQALRIVDEVAHIKKALPSRIFVEVARTNKSEKKKKDSRQKRLSDLYSAIKKDDVLQSGLQDKEFGALKSGLANYDDAALRSKKLYLYYTQMGRCAYTGNIIDLNQLNTDNYDIDHIYPRSLTKDDSFDNLVLCERTANAKKSDIYPIDNRIQTKQKPFWAFLKHQGLISERKYERLTRIAPLTADDLSGFIARQLVETNQSVKATTTLLRRLYPDIDVVFVKAENVSDFRHNNNFIKVRSLNHHHHAKDAYLNIVVGNVYHEKFTRNFRLFFKKNGANRTYNLAKMFNYDVICTNAQDGKAWDVKTSMNTVKKMMASNDVRVTRRLLEQSGALADATIYKASVAAKAKDGAYIGMKTKYSVFADVTKYGGMTKIKNAYSIIVQYTGKKGEEIKEIVPLPIYLINRNATDIELIDYVKSVIPKAKDISIKYRKLCINQLVKVNGFYYYLGGKTNDKIYIDNAIELVVPHDIATYIKLLDKYDLLRKENKTLKASSITTSIYNINTSTVVSLNKVGIDVFDYFMSKLRTPLYMKMKGNKVDELSSTGRSKFIKMTLEEQSIYLLEVLNLLTNSKTTFDVKPLGITGSRSTIGVKIHNLDEFKIINESITGLYSNEVTIV

SEQ ID NO: 310 - protein, 1363 aa, Lactobacillus rhamnosus
MTKLNQPYGIGLDIGSNSIGFAVVDANSHLLRLKGETAIGARLFREGQSAADRRGSRTTRRRLSRTRWRLSFLRDFFAPHITKIDPDFFLRQKYSEISPKDKDRFKYEKRLFNDRTDAEFYEDYPSMYHLRLHLMTHTHKADPREIFLAIHHILKSRGHFLTPGAAKDFNTDKVDLEDIFPALTEAYAQVYPDLELTFDLAKADDFKAKLLDEQATPSDTQKALVNLLLSSDGEKEIVKKRKQVLTEFAKAITGLKTKFNLALGTEVDEADASNWQFSMGQLDDKWSNIETSMTDQGTEIFEQIQELYRARLLNGIVPAGMSLSQAKVADYGQHKEDLELFKTYLKKLNDHELAKTIRGLYDRYINGDDAKPFLREDFVKALTKEVTAHPNEVSEQLLNRMGQANFMLKQRTKANGAIPIQLQQRELDQIIANQSKYYDWLAAPNPVEAHRWKMPYQLDELLNFHIPYYVGPLITPKQQAESGENVFAWMVRKDPSGNITPYNFDEKVDREASANTFIQRMKTTDTYLIGEDVLPKQSLLYQKYEVLNELNNVRINNECLGTDQKQRLIREVFERHSSVTIKQVADNLVAHGDFARRPEIRGLADEKRFLSSLSTYHQLKEILHEAIDDPTKLLDIENIITWSTVFEDHTIFETKLAEIEWLDPKKINELSGIRYRGWGQFSRKLLDGLKLGNGHTVIQELMLSNHNLMQILADETLKETMTELNQDKLKTDDIEDVINDAYTSPSNKKALRQVLRVVEDIKHAANGQDPSWLFIETADGTGTAGKRTQSRQKQIQTVYANAAQELIDSAVRGELEDKIADKASFTDRLVLYFMQGGRDIYTGAPLNIDQLSHYDIDHILPQSLIKDDSLDNRVLVNATINREKNNVFASTLFAGKMKATWRKWHEAGLISGRKLRNLMLRPDEIDKFAKGFVARQLVETRQIIKLTEQIAAAQYPNTKIIAVKAGLSHQLREELDFPKNRDVNHYHHAFDAFLAARIGTYLLKRYPKLAPFFTYGEFAKVDVKKFREFNFIGALTHAKKNIIAKDTGEIVWDKERDIRELDRIYNFKRMLITHEVYFETADLFKQTIYAAKDSKERGGSKQLIPKKQGYPTQVYGGYTQESGSYNALVRVAEADTTAYQVIKISAQNASKIASANLKSREKGKQLLNEIVVKQLAKRRKNWKPSANSFKIVIPRFGMGTLFQNAKYGLFMVNSDTYYRNYQELWLSRENQKLLKKLFSIKYEKTQMNHDALQVYKAIIDQVEKFFKLYDINQFRAKLSDAIERFEKLPINTDGNKIGKTETLRQILIGLQANGTRSNVKNLGIKTDLGLLQVGSGIKLDKDTQIVYQSPSGLFKRRIPLADL

SEQ ID NO: 311 - protein, 1365 aa, Filifactor alocis
MTKEYYLGLDVGTNSVGWAVTDSQYNLCKFKKKDMWGIRLFESANTAKDRRLQRGNRRRLERKKQRIDLLQEIFSPEICKIDPTFFIRLNESRLHLEDKSNDFKYPLFIEKDYSDIEYYKEFPTIFHLRKHLIESEEKQDIRLIYLALHNIIKTRGHFLIDGDLQSAKQLRPILDTFLLSLQEEQNLSVSLSENQKDEYEEILKNRSIAKSEKVKKLKNLFEISDELEKEEKKAQSAVIENFCKFIVGNKGDVCKFLRVSKEELEIDSFSFSEGKYEDDIVKNLEEKVPEKVYLFEQMKAMYDWNILVDILETEEYISFAKVKQYEKHKTNLRLLRDIILKYCTKDEYNRMFNDEKEAGSYTAYVGKLKKNNKKYWIEKKRNPEEFYKSLGKLLDKIEPLKEDLEVLTMMIEECKNHTLLPIQKNKDNGVIPHQVHEVELKKILENAKKYYSFLTETDKDGYSVVQKIESIFRFRIPYYVGPLSTRHQEKGSNVWMVRKPGREDRIYPWNMEEIIDFEKSNENFITRMTNKCTYLIGEDVLPKHSLLYSKYMVLNELNNVKVRGKKLPTSLKQKVFEDLFENKSKVTGKNLLEYLQIQDKDIQIDDLSGFDKDFKTSLKSYLDFKKQIFGEEIEKESIQNMIEDIIKWITIYGNDKEMLKRVIRANYSNQLTEEQMKKITGFQYSGWGNFSKMFLKGISGSDVSTGETFDIITAMWETDNNLMQILSKKFTFMDNVEDFNSGKVGKIDKITYDSTVKEMFLSPENKRAVWQTIQVAEEIKKVMGCEPKKIFIEMARGGEKVKKRTKSRKAQLLELYAACEEDCRELIKEIEDRDERDFNSMKLFLYYTQFGKCMYSGDDIDINELIRGNSKWDRDHIYPQSKIKDDSIDNLVLVNKTYNAKKSNELLSEDIQKKMHSFWLSLLNKKLITKSKYDRLTRKGDFTDEELSGFIARQLVETRQSTKAIADIFKQIYSSEVVYVKSSLVSDFRKKPLNYLKSRRVNDYHHAKDAYLNIVVGNVYNKKFTSNPIQWMKKNRDTNYSLNKVFEHDVVINGEVIWEKCTYHEDTNTYDGGTLDRIRKIVERDNILYTEYAYCEKGELFNATIQNKNGNSTVSLKKGLDVKKYGGYFSANTSYFSLIEFEDKKGDRARHIIGVPIYIANMLEHSPSAFLEYCEQKGYQNVRILVEKIKKNSLLIINGYPLRIRGENEVDTSFKRAIQLKLDQKNYELVRNIEKFLEKYVEKKGNYPIDENRDHITHEKMNQLYEVLLSKMKKFNKKGMADPSDRIEKSKPKFIKLEDLIDKINVINKMLNLLRCDNDTKADLSLIELPKNAGSFVVKKNTIGKSKIILVNQSVTGLYENRREL

SEQ ID NO: 312 - protein, 1389 aa, Oenococcus kitaharae
MARDYSVGLDIGTSSVGWAAIDNKYHLIRAKSKNLIGVRLFDSAVTAEKRRGYRTTRRRLSRRHWRLRLLNDIFAGPLTDFGDENFLARLKYSWVHPQDQSNQAHFAAGLLFDSKEQDKDFYRKYPTIYHLRLALMNDDQKHDLREVYLAIHHLVKYRGHFLIEGDVKADSAFDVHTFADAIQRYAESNNSDENLLGKIDEKKLSAALTDKHGSKSQRAETAETAFDILDLQSKKQIQAILKSVVGNQANLMAIFGLDSSAISKDEQKNYKFSFDDADIDEKIADSEALLSDTEFEFLCDLKAAFDGLTLKMLLGDDKTVSAAMVRRFNEHQKDWEYIKSHIRNAKNAGNGLYEKSKKFDGINAAYLALQSDNEDDRKKAKKIFQDEISSADIPDDVKADFLKKIDDDQFLPIQRTKNNGTIPHQLHRNELEQIIEKQGIYYPFLKDTYQENSHELNKITALINFRVPYYVGPLVEEEQKIADDGKNIPDPTNHWMVRKSNDTITPWNLSQVVDLDKSGRRFIERLTGTDTYLIGEPTLPKNSLLYQKFDVLQELNNIRVSGRRLDIRAKQDAFEHLFKVQKTVSATNLKDFLVQAGYISEDTQIEGLADVNGKNFNNALTTYNYLVSVLGREFVENPSNEELLEEITELQTVFEDKKVLRRQLDQLDGLSDHNREKLSRKHYTGWGRISKKLLTTKIVQNADKIDNQTFDVPRMNQSIIDTLYNTKMNLMEIINNAEDDFGVRAWIDKQNTTDGDEQDVYSLIDELAGPKEIKRGIVQSFRILDDITKAVGYAPKRVYLEFARKTQESHLTNSRKNQLSTLLKNAGLSELVTQVSQYDAAALQNDRLYLYFLQQGKDMYSGEKLNLDNLSNYDIDHIIPQAYTKDNSLDNRVLVSNITNRRKSDSSNYLPALIDKMRPFWSVLSKQGLLSKHKFANLTRTRDFDDMEKERFIARSLVETRQIIKNVASLIDSHFGGETKAVAIRSSLTADMRRYVDIPKNRDINDYHHAFDALLFSTVGQYTENSGLMKKGQLSDSAGNQYNRYIKEWIHAARLNAQSQRVNPFGFVVGSMRNAAPGKLNPETGEITPEENADWSIADLDYLHKVMNFRKITVTRRLKDQKGQLYDESRYPSVLHDAKSKASINFDKHKPVDLYGGFSSAKPAYAALIKFKNKFRLVNVLRQWTYSDKNSEDYILEQIRGKYPKAEMVLSHIPYGQLVKKDGALVTISSATELHNFEQLWLPLADYKLINTLLKTKEDNLVDILHNRLDLPEMTIESAFYKAFDSILSFAFNRYALHQNALVKLQAHRDDFNALNYEDKQQTLERILDALHASPASSDLKKINLSSGFGRLFSPSHFTLADTDEFIFQSVTGLFSTQKTVAQLYQETK

SEQ ID NO: 313 - protein, 1323 aa, Fructobacillus fructosus
MVYDVGLDIGTGSVGWVALDENGKLARAKGKNLVGVRLFDTAQTAADRRGFRTTRRRLSRRKWRLRLLDELFSAEINEIDSSFFQRLKYSYVHPKDEENKAHYYGGYLFPTEEETKKFHRSYPTIYHLRQELMAQPNKRFDIREIYLAIHHLVKYRGHFLSSQEKITIGSTYNPEDLANAIEVYADEKGLSWELNNPEQLTEIISGEAGYGLNKSMKADEALKLFEFDNNQDKVAIKTLLAGLTGNQIDFAKLFGKDISDKDEAKLWKLKLDDEALEEKSQTILSQLTDEEIELFHAVVQAYDGFVLIGLLNGADSVSAAMVQLYDQHREDRKLLKSLAQKAGLKHKRFSEIYEQLALATDEATIKNGISTARELVEESNLSKEVKEDTLRRLDENEFLPKQRTKANSVIPHQLHLAELQKILQNQGQYYPFLLDTFEKEDGQDNKIEELLRFRIPYYVGPLVTKKDVEHAGGDADNHWVERNEGFEKSRVTPWNFDKVFNRDKAARDFIERLTGNDTYLIGEKTLPQNSLRYQLFTVLNELNNVRVNGKKFDSKTKADLINDLFKARKTVSLSALKDYLKAQGKGDVTITGLADESKFNSSLSSYNDLKKTFDAEYLENEDNQETLEKIIEIQTVFEDSKIASRELSKLPLDDDQVKKLSQTHYTGWGRLSEKLLDSKIIDERGQKVSILDKLKSTSQNFMSIINNDKYGVQAWITEQNTGSSKLTFDEKVNELTTSPANKRGIKQSFAVLNDIKKAMKEEPRRVYLEFAREDQTSVRSVPRYNQLKEKYQSKSLSEEAKVLKKTLDGNKNKMSDDRYFLYFQQQGKDMYTGRPINFERLSQDYDIDHIIPQAFTKDDSLDNRVLVSRPENARKSDSFAYTDEVQKQDGSLWTSLLKSGFINRKKYERLTKAGKYLDGQKTGFIARQLVETRQIIKNVASLIEGEYENSKAVAIRSEITADMRLLVGIKKHREINSFHHAFDALLITAAGQYMQNRYPDRDSTNVYNEFDRYTNDYLKNLRQLSSRDEVRRLKSFGFVVGTMRKGNEDWSEENTSYLRKVMMFKNILTTKKTEKDRGPLNKETIFSPKSGKKLIPLNSKRSDTALYGGYSNVYSAYMTLVRANGKNLLIKIPISIANQIEVGNLKINDYIVNNPAIKKFEKILISKLPLGQLVNEDGNLIYLASNEYRHNAKQLWLSTTDADKIASISENSSDEELLEAYDILTSENVKNRFPFFKKDIDKLSQVRDEFLDSDKRIAVIQTILRGLQIDAAYQAPVKIISKKVSDWHKLQQSGGIKLSDNSEMIYQSATGIFETRVKISDLL

SEQ ID NO: 314 - protein, 1329 aa, Catenibacterium mitsuokai
IVDYCIGLDLGTGSVGWAVVDMNHRLMKRNGKHLWGSRLFSNAETAANRRASRSIRRRYNKRRERIRLLRAILQDMVLEKDPTFFIRLEHTSFLDEEDKAKYLGTDYKDNYNLFIDEDFNDYTYYHKYPTIYHLRKALCESTEKADPRLIYLALHHIVKYRGNFLYEGQKFNMDASNIEDKLSDIFTQFTSFNNIPYEDDEKKNLEILEILKKPLSKKAKVDEVMTLIAPEKDYKSAFKELVTGIAGNKMNVTKMILCEPIKQGDSEIKLKFSDSNYDDQFSEVEKDLGEYVEFVDALHNVYSWVELQTIMGATHTDNASISEAMVSRYNKHHDDLKLLKDCIKNNVPNKYFDMFRNDSEKSKGYYNYINRPSKAPVDEFYKYVKKCIEKVDTPEAKQILNDIELENFLLKQNSRTNGSVPYQMQLDEMIKIIDNQAEYYPILKEKREQLLSILTFRIPYYFGPLNETSEHAWIKRLEGKENQRILPWNYQDIVDVDATAEGFIKRMRSYCTYFPDEEVLPKNSLIVSKYEVYNELNKIRVDDKLLEVDVKNDIYNELFMKNKTVTEKKLKNWLVNNQCCSKDAEIKGFQKENQFSTSLTPWIDFTNIFGKIDQSNFDLIENIIYDLTVFEDKKIMKRRLKKKYALPDDKVKQILKLKYKDWSRLSKKLLDGIVADNRFGSSVTVLDVLEMSRLNLMEIINDKDLGYAQMIEEATSCPEDGKFTYEEVERLAGSPALKRGIWQSLQIVEEITKVMKCRPKYIYIEFERSEEAKERTESKIKKLENVYKDLDEQTKKEYKSVLEELKGFDNTKKISSDSLFLYFTQLGKCMYSGKKLDIDSLDKYQIDHIVPQSLVKDDSFDNRVLVVPSENQRKLDDLVVPFDIRDKMYRFWKLLFDHELISPKKFYSLIKTEYTERDEERFINRQLVETRQITKNVTQIIEDHYSTTKVAAIRANLSHEFRVKNHIYKNRDINDYHHAHDAYIVALIGGFMRDRYPNMHDSKAVYSEYMKMFRKNKNDQKRWKDGFVINSMNYPYEVDGKLIWNPDLINEIKKCFYYKDCYCTTKLDQKSGQLFNLTVLSNDAHADKGVTKAVVPVNKNRSDVHKYGGFSGLQYTIVAIEGQKKKGKKTELVKKISGVPLHLKAASINEKINYIEEKEGLSDVRIIKDNIPVNQMIEMDGGEYLLTSPTEYVNARQLVLNEKQCALIADIYNAIYKQDYDNLDDILMIQLYIELTNKMKVLYPAYRGIAEKFESMNENYVVISKEEKANIIKQMLIVMHRGPQNGNIVYDDFKISDRIGRLKTKNHNLNNIVFISQSPTGIYTKKYKL

SEQ ID NO: 315 - protein, 1348 aa, Finegoldia magna
MKSEKKYYIGLDVGTNSVGWAVTDEFYNILRAKGKDLWGVRLFEKADTAANTRIFRSGRRRNDRKGMRLQILREIFEDEIKKVDKDFYDRLDESKFWAEDKKVSGKYSLFNDKNFSDKQYFEKFPTIFHLRKYLMEEHGKVDIRYYFLAINQMMKRRGHFLIDGQISHVTDDKPLKEQLILLINDLLKIELEEELMDSIFEILADVNEKRTDKKNNLKELIKGQDFNKQEGNILNSIFESIVTGKAKIKNIISDEDILEKIKEDNKEDFVLTGDSYEENLQYFEEVLQENITLFNTLKSTYDFLILQSILKGKSTLSDAQVERYDEHKKDLEILKKVIKKYDEDGKLFKQVFKEDNGNGYVSYIGYYLNKNKKITAKKKISNIEFTKYVKGILEKQCDCEDEDVKYLLGKIEQENFLLKQISSINSVIPHQIHLFELDKILENLAKNYPSFNNKKEEFTKIEKIRKTFTFRIPYYVGPLNDYHKNNGGNAWIFRNKGEKIRPWNFEKIVDLHKSEEEFIKRMLNQCTYLPEETVLPKSSILYSEYMVLNELNNLRINGKPLDTDVKLKLIEELFKKKTKVTLKSIRDYMVRNNFADKEDFDNSEKNLEIASNMKSYIDFNNILEDKFDVEMVEDLIEKITIHTGNKKLLKKYIEETYPDLSSSQIQKIINLKYKDWGRLSRKLLDGIKGTKKETEKTDTVINFLRNSSDNLMQIIGSQNYSFNEYIDKLRKKYIPQEISYEVVENLYVSPSVKKMIWQVIRVTEEITKVMGYDPDKIFIEMAKSEEEKKTTISRKNKLLDLYKAIKKDERDSQYEKLLTGLNKLDDSDLRSRKLYLYYTQMGRDMYTGEKIDLDKLFDSTHYDKDHIIPQSMKKDDSIINNLVLVNKNANQTTKGNIYPVPSSIRNNPKIYNYWKYLMEKEFISKEKYNRLIRNTPLTNEELGGFINRQLVETRQSTKAIKELFEKFYQKSKIIPVKASLASDLRKDMNTLKSREVNDLHHAHDAFLNIVAGDVWNREFTSNPINYVKENREGDKVKYSLSKDFTRPRKSKGKVIWTPEKGRKLIVDTLNKPSVLISNESHVKKGELFNATIAGKKDYKKGKIYLPLKKDDRLQDVSKYGGYKAINGAFFFLVEHTKSKKRIRSIELFPLHLLSKFYEDKNTVLDYAINVLQLQDPKIIIDKINYRTEIIIDNFSYLISTKSNDGSITVKPNEQMYWRVDEISNLKKIENKYKKDAILTEEDRKIMESYIDKIYQQFKAGKYKNRRTTDTIIEKYEIIDLDTLDNKQLYQLLVAFISLSYKTSNNAVDFTVIGLGTECGKPRITNLPDNTYLVYKSITGIYEKRIRIK

SEQ ID NO: 316 - protein, 1384 aa, Coriobacterium glomerans
MKLRGIEDDYSIGLDMGTSSVGWAVTDERGTLAHFKRKPTWGSRLFREAQTAAVARMPRGQRRRYVRRRWRLDLLQKLFEQQMEQADPDFFIRLRQSRLLRDDRAEEHADYRWPLFNDCKFTERDYYQRFPTIYHVRSWLMETDEQADIRLIYLALHNIVKHRGNFLREGQSLSAKSARPDEALNHLRETLRVWSSERGFECSIADNGSILAMLTHPDLSPSDRRKKIAPLFDVKSDDAAADKKLGIALAGAVIGLKTEFKNIFGDFPCEDSSIYLSNDEAVDAVRSACPDDCAELFDRLCEVYSAYVLQGLLSYAPGQTISANMVEKYRRYGEDLALLKKLVKIYAPDQYRMFFSGATYPGTGIYDAAQARGYTKYNLGPKKSEYKPSESMQYDDFRKAVEKLFAKTDARADERYRMMMDRFDKQQFLRRLKTSDNGSIYHQLHLEELKAIVENQGRFYPFLKRDADKLVSLVSFRIPYYVGPLSTRNARTDQHGENRFAWSERKPGMQDEPIFPWNWESIIDRSKSAEKFILRMTGMCTYLQQEPVLPKSSLLYEEFCVLNELNGAHWSIDGDDEHRFDAADREGIIEELFRRKRTVSYGDVAGWMERERNQIGAHVCGGQGEKGFESKLGSYIFFCKDVFKVERLEQSDYPMIERIILWNTLFEDRKILSQRLKEEYGSRLSAEQIKTICKKRFTGWGRLSEKFLTGITVQVDEDSVSIMDVLREGCPVSGKRGRAMVMMEILRDEELGFQKKVDDFNRAFFAENAQALGVNELPGSPAVRRSLNQSIRIVDEIASIAGKAPANIFIEVTRDEDPKKKGRRTKRRYNDLKDALEAFKKEDPELWRELCETAPNDMDERLSLYFMQRGKCLYSGRAIDIHQLSNAGIYEVDHIIPRTYVKDDSLENKALVYREENQRKTDMLLIDPEIRRRMSGYWRMLHEAKLIGDKKFRNLLRSRIDDKALKGFIARQLVETGQMVKLVRSLLEARYPETNIISVKASISHDLRTAAELVKCREANDFHHAHDAFLACRVGLFIQKRHPCVYENPIGLSQVVRNYVRQQADIFKRCRTIPGSSGFIVNSFMTSGFDKETGEIFKDDWDAEAEVEGIRRSLNFRQCFISRMPFEDHGVFWDATIYSPRAKKTAALPLKQGLNPSRYGSFSREQFAYFFIYKARNPRKEQTLFEFAQVPVRLSAQIRQDENALERYARELAKDQGLEFIRIERSKILKNQLIEIDGDRLCITGKEEVRNACELAFAQDEMRVIRMLVSEKPVSRECVISLFNRILLHGDQASRRLSKQLKLALLSEAFSEASDNVQRNVVLGLIAIFNGSTNMVNLSDIGGSKFAGNVRIKYKKELASPKVNVHLIDQSVTGMFERRTKIGL

SEQ ID NO: 317 - protein, 1391 aa, Eubacterium yurii
MENKQYYIGLDVGTNSVGWAVTDTSYNLLRAKGKDMWGARLFEKANTAAERRTKRTSRRRSEREKARKAMLKELFADEINRVDPSFFIRLEESKFFLDDRSENNRQRYTLFNDATFTDKDYYEKYKTIFHLRSALINSDEKFDVRLVFLAILNLFSHRGHFLNASLKGDGDIQGMDVFYNDLVESCEYFEIELPRITNIDNFEKILSQKGKSRTKILEELSEELSISKKDKSKYNLIKLISGLEASVVELYNIEDIQDENKKIKIGFRESDYEESSLKVKEIIGDEYFDLVERAKSVHDMGLLSNIIGNSKYLCEARVEAYENHHKDLLKIKELLKKYDKKAYNDMFRKMTDKNYSAYVGSVNSNIAKERRSVDKRKIEDLYKYIEDTALKNIPDDNKDKIEILEKIKLGEFLKKQLTASNGVIPNQLQSRELRAILKKAENYLPFLKEKGEKNLTVSEMIIQLFEFQIPYYVGPLDKNPKKDNKANSWAKIKQGGRILPWNFEDKVDVKGSRKEFIEKMVRKCTYISDEHTLPKQSLLYEKFMVLNEINNIKIDGEKISVEAKQKIYNDLFVKGKKVSQKDIKKELISLNIMDKDSVLSGTDTVCNAYLSSIGKFTGVFKEEINKQSIVDMIEDIIFLKTVYGDEKRFVKEEIVEKYGDEIDKDKIKRILGFKFSNWGNLSKSFLELEGADVGTGEVRSIIQSLWETNFNLMELLSSRFTYMDELEKRVKKLEKPLSEWTIEDLDDMYLSSPVKRMIWQSMKIVDEIQTVIGYAPKRIFVEMTRSEGEKVRTKSRKDRLKELYNGIKEDSKQWVKELDSKDESYFRSKKMYLYYLQKGRCMYSGEVIELDKLMDDNLYDIDHIYPRSFVKDDSLDNLVLVKKEINNRKQNDPITPQIQASCQGFWKILHDQGFMSNEKYSRLTRKTQEFSDEEKLSFINRQIVETGQATKCMAQILQKSMGEDVDVVFSKARLVSEFRHKFELFKSRLINDFHHANDAYLNIVVGNSYFVKFTRNPANFIKDARKNPDNPVYKYHMDRFFERDVKSKSEVAWIGQSEGNSGTIVIVKKTMAKNSPLITKKVEEGHGSITKETIVGVKEIKFGRNKVEKADKTPKKPNLQAYRPIKTSDERLCNILRYGGRTSISISGYCLVEYVKKRKTIRSLEAIPVYLGRKDSLSEEKLLNYFRYNLNDGGKDSVSDIRLCLPFISTNSLVKIDGYLYYLGGKNDDRIQLYNAYQLKMKKEEVEYIRKIEKAVSMSKFDEIDREKNPVLTEEKNIELYNKIQDKFENTVFSKRMSLVKYNKKDLSFGDFLKNKKSKFEEIDLEKQCKVLYNIIFNLSNLKEVDLSDIGGSKSTGKCRCKKNITNYKEFKLIQQSITGLYSCEKDLMTI

SEQ ID NO: 318 - protein, 1364 aa, Peptoniphilus duerdenii
MKNLKEYYIGLDIGTASVGWAVTDESYNIPKFNGKKMWGVRLFDDAKTAEERRTQRGSRRRLNRRKERINLLQDLFATEISKVDPNFFLRLDNSDLYREDKDEKLKSKYTLFNDKDFKDRDYHKKYPTIHHLIMDLIEDEGKKDIRLLYLACHYLLKNRGHFIFEGQKFDTKNSFDKSINDLKIHLRDEYNIDLEFNNEDLIEIITDTTLNKTNKKKELKNIVGDTKFLKAISAIMIGSSQKLVDLFEDGEFEETTVKSVDFSTTAFDDKYSEYEEALGDTISLLNILKSIYDSSILENLLKDADKSKDGNKYISKAFVKKFNKHGKDLKTLKRIIKKYLPSEYANIFRNKSINDNYVAYTKSNITSNKRTKASKFTKQEDFYKFIKKHLDTIKETKLNSSENEDLKLIDEMLTDIEFKTFIPKLKSSDNGVIPYQLKLMELKKILDNQSKYYDFLNESDEYGTVKDKVESIMEFRIPYYVGPLNPDSKYAWIKRENTKITPWNFKDIVDLDSSREEFIDRLIGRCTYLKEEKVLPKASLIYNEFMVLNELNNLKLNEFLITEEMKKAIFEELFKTKKKVTLKAVSNLLKKEFNLTGDILLSGTDGDFKQGLNSYIDFKNIIGDKVDRDDYRIKIEEIIKLIVLYEDDKTYLKKKIKSAYKNDFTDDEIKKIAALNYKDWGRLSKRFLTGIEGVDKTTGEKGSIIYFMREYNLNLMELMSGHYTFTEEVEKLNPVENRELCYEMVDELYLSPSVKRMLWQSLRVVDEIKRIIGKDPKKIFIEMARAKEAKNSRKESRKNKLLEFYKFGKKAFINEIGEERYNYLLNEINSEEESKFRWDNLYLYYTQLGRCMYSLEPIDLADLKSNNIYDQDHIYPKSKIYDDSLENRVLVKKNLNHEKGNQYPIPEKVLNKNAYGFWKILFDKGLIGQKKYTRLTRRTPFEERELAEFIERQIVETRQATKETANLLKNICQDSEIVYSKAENASRFRQEFDIIKCRTVNDLHHMHDAYLNIVVGNVYNTKFTKNPLNFIKDKDNVRSYNLENMFKYDVVRGSYTAWIADDSEGNVKAATIKKVKRELEGKNYRFTRMSYIGTGGLYDQNLMRKGKGQIPQKENTNKSNIEKYGGYNKASSAYFALIESDGKAGRERTLETIPIMVYNQEKYGNTEAVDKYLKDNLELQDPKILKDKIKINSLIKLDGFLYNIKGKTGDSLSIAGSVQLIVNKEEQKLIKKMDKFLVKKKDNKDIKVTSFDNIKEEELIKLYKTLSDKLNNGIYSNKRNNQAKNISEALDKFKEISIEEKIDVLNQIILLFQSYNNGCNLKSIGLSAKTGVVFIPKKLNYKECKLINQSITGLFENEVDLLNL

SEQ ID NO: 319 - protein, 1358 aa, Acidaminococcus sp.
MGKMYYLGLDIGTNSVGYAVTDPSYHLLKFKGEPMWGAHVFAAGNQSAERRSFRTSRRRLDRRQQRVKLVQEIFAPVISPIDPRFFIRLHESALWRDDVAETDKHIFFNDPTYTDKEYYSDYPTIHHLIVDLMESSEKHDPRLVYLAVAWLVAHRGHFLNEVDKDNIGDVLSFDAFYPEFLAFLSDNGVSPWVCESKALQATLLSRNSVNDKYKALKSLIFGSQKPEDNFDANISEDGLIQLLAGKKVKVNKLFPQESNDASFTLNDKEDAIEEILGTLTPDECEWIAHIRRLFDWAIMKHALKDGRTISESKVKLYEQHHHDLTQLKYFVKTYLAKEYDDIFRNVDSETTKNYVAYSYHVKEVKGTLPKNKATQEEFCKYVLGKVKNIECSEADKVDFDEMIQRLTDNSFMPKQVSGENRVIPYQLYYYELKTILNKAASYLPFLTQCGKDAISNQDKLLSIMTFRIPYFVGPLRKDNSEHAWLERKAGKIYPWNFNDKVDLDKSEEAFIRRMTNTCTYYPGEDVLPLDSLIYEKFMILNEINNIRIDGYPISVDVKQQVFGLFEKKRRVTVKDIQNLLLSLGALDKHGKLTGIDTTIHSNYNTYHHFKSLMERGVLTRDDVERIVERMTYSDDTKRVRLWLNNNYGTLTADDVKHISRLRKHDFGRLSKMFLTGLKGVHKETGERASILDFMWNTNDNLMQLLSECYTFSDEITKLQEAYYAKAQLSLNDFLDSMYISNAVKRPIYRTLAVVNDIRKACGTAPKRIFIEMARDGESKKKRSVTRREQIKNLYRSIRKDFQQEVDFLEKILENKSDGQLQSDALYLYFAQLGRDMYTGDPIKLEHIKDQSFYNIDHIYPQSMVKDDSLDNKVLVQSEINGEKSSRYPLDAAIRNKMKPLWDAYYNHGLISLKKYQRLTRSTPFTDDEKWDFINRQLVETRQSTKALAILLKRKFPDTEIVYSKAGLSSDFRHEFGLVKSRNINDLHHAKDAFLAIVTGNVYHERFNRRWFMVNQPYSVKTKTLFTHSIKNGNFVAWNGEEDLGRIVKMLKQNKNTIHFTRFSFDRKEGLFDIQPLKASTGLVPRKAGLDVVKYGGYDKSTAAYYLLVRFTLEDKKTQHKLMMIPVEGLYKARIDHDKEFLTDYAQTTISEILQKDKQKVINIMFPMGTRHIKLNSMISIDGFYLSIGGKSSKGKSVLCHAMVPLIVPHKIECYIKAMESFARKFKENNKLRIVEKFDKITVEDNLNLYELFLQKLQHNPYNKFFSTQFDVLTNGRSTFTKLSPEEQVQTLLNILSIFKTCRSSGCDLKSINGSAQAARIMISADLTGLSKKYSDIRLVEQSASGLFVSKSQNLLEYL

SEQ ID NO: 320 - protein, 1356 aa, Lactobacillus farciminis
MTKKEQPYNIGLDIGTSSVGWAVTNDNYDLLNIKKKNLWGVRLFEEAQTAKETRLNRSTRRRYRRRKNRINWLNEIFSEELAKTDPSFLIRLQNSWVSKKDPDRKRDKYNLFIDGPYTDKEYYREFPTIFHLRKELILNKDKADIRLIYLALHNILKYRGNFTYEHQKFNISNLNNNLSKELIELNQQLIKYDISFPDDCDWNHISDILIGRGNATQKSSNILKDFTLDKETKKLLKEVINLILGNVAHLNTIFKTSLTKDEEKLNFSGKDIESKLDDLDSILDDDQFTVLDAANRIYSTITLNEILNGESYFSMAKVNQYENHAIDLCKLRDMWHTTKNEEAVEQSRQAYDDYINKPKYGTKELYTSLKKFLKVALPTNLAKEAEEKISKGTYLVKPRNSENGVVPYQLNKIEMEKIIDNQSQYYPFLKENKEKLLSILSFRIPYYVGPLQSAEKNPFAWMERKSNGHARPWNFDEIVDREKSSNKFIRRMTVTDSYLVGEPVLPKNSLIYQRYEVLNELNNIRITENLKTNPIGSRLTVETKQRIYNELFKKYKKVTVKKLTKWLIAQGYYKNPILIGLSQKDEFNSTLTTYLDMKKIFGSSFMEDNKNYDQIEELIEWLTIFEDKQILNEKLHSSKYSYTPDQIKKISNMRYKGWGRLSKKILMDITTETNTPQLLQLSNYSILDLMWATNNNFISIMSNDKYDFKNYIENHNLNKNEDQNISDLVNDIHVSPALKRGITQSIKIVQEIVKFMGHAPKHIFIEVTRETKKSEITTSREKRIKRLQSKLLNKANDFKPQLREYLVPNKKIQEELKKHKNDLSSERIMLYFLQNGKSLYSEESLNINKLSDYQVDHILPRTYIPDDSLENKALVLAKENQRKADDLLLNSNVIDRNLERWTYMLNNNMIGLKKFKNLTRRVITDKDKLGFIHRQLVQTSQMVKGVANILDNMYKNQGTTCIQARANLSTAFRKALSGQDDTYHFKHPELVKNRNVNDFHHAQDAYLASFLGTYRLRRFPTNEMLLMNGEYNKFYGQVKELYSKKKKLPDSRKNGFIISPLVNGTTQYDRNTGEIIWNVGFRDKILKIFNYHQCNVTRKTEIKTGQFYDQTIYSPKNPKYKKLIAQKKDMDPNIYGGFSGDNKSSITIVKIDNNKIKPVAIPIRLINDLKDKKTLQNWLEENVKHKKSIQIIKNNVPIGQIIYSKKVGLLSLNSDREVANRQQLILPPEHSALLRLLQIPDEDLDQILAFYDKNILVEILQELITKMKKFYPFYKGEREFLIANIENFNQATTSEKVNSLEELITLLHANSTSAHLIFNNIEKKAFGRKTHGLTLNNTDFIYQSVTGLYETRIHIE

SEQ ID NO: 321 - protein, 1421 aa, Streptococcus sanguinis
MTKFNKNYSIGLDIGVSSVGYAVVTEDYRVPAFKFKVLGNTEKEKIKKNLIGSTTFVSAQPAKGTRVFRVNRRRIDRRNHRITYLRDIFQKEIEKVDKNFYRRLDESFRVLGDKSEDLQIKQPFFGDKELETAYHKKYPTIYHLRKHLADADKNSPVADIREVYMAISHILKYRGHFLTLDKINPNNINMQNSWIDFIESCQEVFDLEISDESKNIADIFKSSENRQEKVKKILPYFQQELLKKDKSIFKQLLQLLFGLKTKFKDCFELEEEPDLNFSKENYDENLENFLGSLEEDFSDVFAKLKVLRDTILLSGMLTYTGATHARFSATMVERYEEHRKDLQRFKFFIKQNLSEQDYLDIFGRKTQNGFDVDKETKGYVGYITNKMVLTNPQKQKTIQQNFYDYISGKITGIEGAEYFLNKISDGTFLRKLRTSDNGAIPNQIHAYELEKIIERQGKDYPFLLENKDKLLSILTFKIPYYVGPLAKGSNSRFAWIKRATSSDILDDNDEDTRNGKIRPWNYQKLINMDETRDAFITNLIGNDIILLNEKVLPKRSLIYEEVMLQNELTRVKYKDKYGKAHFFDSELRQNIINGLFKNNSKRVNAKSLIKYLSDNHKDLNAIEIVSGVEKGKSFNSTLKTYNDLKTIFSEELLDSEIYQKELEEIIKVITVFDDKKSIKNYLTKFFGHLEILDEEKINQLSKLRYSGWGRYSAKLLLDIRDEDTGFNLLQFLRNDEENRNLTKLISDNTLSFEPKIKDIQSKSTIEDDIFDEIKKLAGSPAIKRGILNSIKIVDELVQIIGYPPHNIVIEMARENMTTEEGQKKAKTRKTKLESALKNIENSLLENGKVPHSDEQLQSEKLYLYYLQNGKDMYTLDKTGSPAPLYLDQLDQYEVDHIIPYSFLPIDSIDNKVLTHRENNQQKLNNIPDKETVANMKPFWEKLYNAKLISQTKYQRLTTSERTPDGVLTESMKAGFIERQLVETRQIIKHVARILDNRFSDTKIITLKSQLITNFRNTFHIAKIRELNDYHHAHDAYLAVVVGQTLLKVYPKLAPELIYGHHAHFNRHEENKATLRKHLYSNIMRFFNNPDSKVSKDIWDCNRDLPIIKDVIYNSQINFVKRTMIKKGAFYNQNPVGKFNKQLAANNRYPLKTKALCLDTSIYGGYGPMNSALSIIIIAERFNEKKGKIETVKEFHDIFIIDYEKFNNNPFQFLNDTSENGFLKKNNINRVLGFYRIPKYSLMQKIDGTRMLFESKSNLHKATQFKLTKTQNELFFHMKRLLTKSNLMDLKSKSAIKESQNFILKHKEEFDNISNQLSAFSQKMLGNTTSLKNLIKGYNERKIKEIDIRDETIKYFYDNFIKMFSFVKSGAPKDINDFFDNKCTVARMRPKPDKKLLNATLIHQSITGLYETRIDLSKLGED

SEQ ID NO: 322 - protein, 1338 aa, Coprococcus catus
MKQEYFLGLDMGTGSLGWAVTDSTYQVMRKHGKALWGTRLFESASTAEERRMFRTARRRLDRRNWRIQVLQEIFSEEISKVDPGFFLRMKESKYYPEDKRDAEGNCPELPYALFVDDNYTDKNYHKDYPTIYHLRKMLMETTEIPDIRLVYLVLHHMMKHRGHFLLSGDISQIKEFKSTFEQLIQNIQDEELEWHISLDDAAIQFVEHVLKDRNLTRSTKKSRLIKQLNAKSACEKAILNLLSGGTVKLSDIFNNKELDESERPKVSFADSGYDDYIGIVEAELAEQYYIIASAKAVYDWSVLVEILGNSVSISEAKIKVYQKHQADLKTLKKIVRQYMTKEDYKRVFVDTEEKLNNYSAYIGMTKKNGKKVDLKSKQCTQADFYDFLKKNVIKVIDHKEITQEIESEIEKENFLPKQVTKDNGVIPYQVHDYELKKILDNLGTRMPFIKENAEKIQQLFEFRIPYYVGPLNRVDDGKDGKFTWSVRKSDARIYPWNFTEVIDVEASAEKFIRRMTNKCTYLVGEDVLPKDSLVYSKFMVLNELNNLRLNGEKISVELKQRIYEELFCKYRKVTRKKLERYLVIEGIAKKGVEITGIDGDFKASLTAYHDFKERLTDVQLSQRAKEAIVLNVVLFGDDKKLLKQRLSKMYPNLTTGQLKGICSLSYQGWGRLSKTFLEEITVPAPGTGEVWNIMTALWQTNDNLMQLLSRNYGFTNEVEEFNTLKKETDLSYKTVDELYVSPAVKRQIWQTLKVVKEIQKVMGNAPKRVFVEMAREKQEGKRSDSRKKQLVELYRACKNEERDWITELNAQSDQQLRSDKLFLYYIQKGRCMYSGETIQLDELWDNTKYDIDHIYPQSKTMDDSLNNRVLVKKNYNAIKSDTYPLSLDIQKKMMSFWKMLQQQGFITKEKYVRLVRSDELSADELAGFIERQIVETRQSTKAVATILKEALPDTEIVYVKAGNVSNFRQTYELLKVREMNDLHHAKDAYLNIVVGNAYFVKFTKNAAWFIRNNPGRSYNLKRMFEFDIERSGEIAWKAGNKGSIVTVKKVMQKNNILVTRKAYEVKGGLFDQQIMKKGKGQVPIKGNDERLADIEKYGGYNKAAGTYFMLVKSLDKKGKEIRTIEFVPLYLKNQIEINHESAIQYLAQERGLNSPEILLSKIKIDTLFKVDGFKMWLSGRTGNQLIFKGANQLILSHQEAAILKGVVKYVNRKNENKDAKLSERDGMTEEKLLQLYDTFLDKLSNTVYSIRLSAQIKTLTEKRAKFIGLSNEDQCIVLNEILHMFQCQSGSANLKLIGGPGSAGILVMNNNITACKQISVINQSPTGIYEKEIDLIKL

SEQ ID NO: 323 - protein, 1345 aa, Streptococcus mutans
MKKPYSIGLDIGTNSVGWAVVTDDYKVPAKKMKVLGNTDKSHIEKNLLGALLFDSGNTAEDRRLKRTARRRYTRRRNRILYLQEIFSEEMGKVDDSFFHRLEDSFLVTEDKRGERHPIFGNLEEEVKYHENFPTIYHLRQYLADNPEKVDLRLVYLALAHIIKFRGHFLIEGKFDTRNNDVQRLFQEFLAVYDNTFENSSLQEQNVQVEEILTDKISKSAKKDRVLKLFPNEKSNGRFAEFLKLIVGNQADFKKHFELEEKAPLQFSKDTYEEELEVLLAQIGDNYAELFLSAKKLYDSILLSGILTVTDVGTKAPLSASMIQRYNEHQMDLAQLKQFIRQKLSDKYNEVFSDVSKDGYAGYIDGKTNQEAFYKYLKGLLNKIEGSGYFLDKIEREDFLRKQRTFDNGSIPHQIHLQEMRAIIRRQAEFYPFLADNQDRIEKLLTFRIPYYVGPLARGKSDFAWLSRKSADKITPWNFDEIVDKESSAEAFINRMTNYDLYLPNQKVLPKHSLLYEKFTVYNELTKVKYKTEQGKTAFFDANMKQEIFDGVFKVYRKVTKDKLMDFLEKEFDEFRIVDLTGLDKENKVFNASYGTYHDLCKILDKDFLDNSKNEKILEDIVLTLTLFEDREMIRKRLENYSDLLTKEQVKKLERRHYTGWGRLSAELIHGIRNKESRKTILDYLIDDGNSNRNFMQLINDDALSFKEEIAKAQVIGETDNLNQVVSDIAGSPAIKKGILQSLKIVDELVKIMGHQPENIVVEMARENQFTNQGRRNSQQRLKGLTDSIKEFGSQILKEHPVENSQLQNDRLFLYYLQNGRDMYTGEELDIDYLSQYDIDHIIPQAFIKDNSIDNRVLTSSKENRGKSDDVPSKDVVRKMKSYWSKLLSAKLITQRKFDNLTKAERGGLTDDDKAGFIKRQLVETRQITKHVARILDERFNTETDENNKKIRQVKIVTLKSNLVSNFRKEFELYKVREINDYHHAHDAYLNAVIGKALLGVYPQLEPEFVYGDYPHFHGHKENKATAKKFFYSNIMNFFKKDDVRTDKNGEIIWKKDEHISNIKKVLSYPQVNIVKKVEEQTGGFSKESILPKGNSDKLIPRKTKKFYWDTKKYGGFDSPIVAYSILVIADIEKGKSKKLKTVKALVGVTIMEKMTFERDPVAFLERKGYRNVQEENIIKLPKYSLFKLENGRKRLLASARELQKGNEIVLPNHLGTLLYHAKNIHKVDEPKHLDYVDKHKDEFKELLDVVSNFSKKYTLAEGNLEKIKELYAQNNGEDLKELASSFINLLTFTAIGAPATFKFFDKNIDRKRYTSTTEILNATLIHQSITGLYETRIDLNKLGGD

SEQ ID NO: 324 - protein, 1368 aa, Streptococcus pyogenes [sequence omitted]

SEQ ID NO: 325 - protein, 1388 aa, Streptococcus thermophilus
MTKPYSIGLDIGTNSVGWAVTTDNYKVPSKKMKVLGNTSKKYIKKNLLGVLLFDSGITAEGRRLKRTARRRYTRRRNRILYLQEIFSTEMATLDDAFFQRLDDSFLVPDDKRDSKYPIFGNLVEEKAYHDEFPTIYHLRKYLADSTKKADLRLVYLALAHMIKYRGHFLIEGEFNSKNNDIQKNFQDFLDTYNAIFESDLSLENSKQLEEIVKDKISKLEKKDRILKLFPGEKNSGIFSEFLKLIVGNQADFRKCFNLDEKASLHFSKESYDEDLETLLGYIGDDYSDVFLKAKKLYDAILLSGFLTVTDNETEAPLSSAMIKRYNEHKEDLALLKEYIRNISLKTYNEVFKDDTKNGYAGYIDGKTNQEDFYVYLKKLLAEFEGADYFLEKIDREDFLRKQRTFDNGSIPYQIHLQEMRAILDKQAKFYPFLAKNKERIEKILTFRIPYYVGPLARGNSDFAWSIRKRNEKITPWNFEDVIDKESSAEAFINRMTSFDLYLPEEKVLPKHSLLYETFNVYNELTKVRFIAESMRDYQFLDSKQKKDIVRLYFKDKRKVTDKDIIEYLHAIYGYDGIELKGIEKQFNSSLSTYHDLLNIINDKEFLDDSSNEAIIEEIIHTLTIFEDREMIKQRLSKFENIFDKSVLKKLSRRHYTGWGKLSAKLINGIRDEKSGNTILDYLIDDGISNRNFMQLIHDDALSFKKKIQKAQIIGDEDKGNIKEVVKSLPGSPAIKKGILQSIKIVDELVKVMGGRKPESIVVEMARENQYTNQGKSNSQQRLKRLEKSLKELGSKILKENIPAKLSKIDNNALQNDRLYLYYLQNGKDMYTGDDLDIDRLSNYDIDHIIPQAFLKDNSIDNKVLVSSASNRGKSDDVPSLEVVKKRKTFWYQLLKSKLISQRKFDNLTKAERGGLSPEDKAGFIQRQLVETRQITKHVARLLDEKFNNKKDENNRAVRTVKIITLKSTLVSQFRKDFELYKVREINDFHHAHDAYLNAVVASALLKKYPKLEPEFVYGDYPKYNSFRERKSATEKVYFYSNIMNIFKKSISLADGRVIERPLIEVNEETGESVWNKESDLATVRRVLSYPQVNVVKKVEEQNHGLDRGKPKGLFNANLSSKPKPNSNENLVGAKEYLDPKKYGGYAGISNSFTVLVKGTIEKGAKKKITNVLEFQGISILDRINYRKDKLNFLLEKGYKDIELIIELPKYSLFELSDGSRRMLASILSTNNKRGEIHKGNQIFLSQKFVKLLYHAKRISNTINENHRKYVENHKKEFEELFYYILEFNENYVGAKKNGKLLNSAFQSWQNHSIDELCSSFIGPTGSERKGLFELTSRGSAADFEFLGVKIPRYRDYTPSSLLKDATLIHQSVTGLYETRIDLAKLGEG

SEQ ID NO: 326 - protein, 1374 aa, Fusobacterium nucleatum
MKKQKFSDYYLGFDIGTNSVGWCVTDLDYNVLRFNKKDMWGSRLFDEAKTAAERRVQRNSRRRLKRRKWRLNLLEEIFSDEIMKIDSNFFRRLKESSLWLEDKNSKEKFTLFNDDNYKDYDFYKQYPTIFHLRDELIKNPEKKDIRLIYLALHSIFKSRGHFLFEGQNLKEIKNFETLYNNLISFLEDNGINKSIDKDNIEKLEKIICDSGKGLKDKEKEFKGIFNSDKQLVAIFKLSVGSSVSLNDLFDTDEYKKEEVEKEKISFREQIYEDDKPIYYSILGEKIELLDIAKSFYDFMVLNNILSDSNYISEAKVKLYEEHKKDLKNLKYIIRKYNKENYDKLFKDKNENNYPAYIGLNKEKDKKEVVEKSRLKIDDLIKVIKGYLPKPERIEEKDKTIFNEILNKIELKTILPKQRISDNGTLPYQIHEVELEKILENQSKYYDFLNYEENGVSTKDKLLKTFKFRIPYYVGPLNSYHKDKGGNSWIVRKEEGKILPWNFEQKVDIEKSAEEFIKRMTNKCTYLNGEDVIPKDSFLYSEYIILNELNKVQVNDEFLNEENKRKIIDELFKENKKVSEKKFKEYLLVNQIANRTVELKGIKDSFNSNYVSYIKFKDIFGEKLNLDIYKEISEKSILWKCLYGDDKKIFEKKIKNEYGDILNKDEIKKINSFKFNTWGRLSEKLLTGIEFINLETGECYSSVMEALRRTNYNLMELLSSKFTLQESIDNENKEMNEVSYRDLIEESYVSPSLKRAILQTLKIYEEIKKITGRVPKKVFIEMARGGDESMKNKKIPARQEQLKKLYDSCGNDIANFSIDIKEMKNSLSSYDNNSLRQKKLYLYYLQFGKCMYTGREIDLDRLLQNNDTYDIDHIYPRSKVIKDDSFDNLVLVLKNENAEKSNEYPVKKEIQEKMKSFWRFLKEKNFISDEKYKRLTGKDDFELRGFMARQLVNVRQTTKEVGKILQQIEPEIKIVYSKAEIASSFREMFDFIKVRELNDTHHAKDAYLNIVAGNVYNTKFTEKPYRYLQEIKENYDVKKIYNYDIKNAWDKENSLEIVKKNMEKNTVNITRFIKEEKGELFNLNPIKKGETSNEIISIKPKLYDGKDNKLNEKYGYYTSLKAAYFIYVEHEKKNKKVKTFERITRIDSTLIKNEKNLIKYLVSQKKLLNPKIIKKIYKEQTLIIDSYPYTFTGVDSNKKVELKNKKQLYLEKKYEQILKNALKFVEDNQGETEENYKFIYLKKRNNNEKNETIDAVKERYNIEFNEMYDKFLEKLSSKDYKNYINNKLYTNFLNSKEKFKKLKLWEKSLILREFLKIFNKNTYGKYEIKDSQTKEKLFSFPEDTGRIRLGQSSLGNNKELLEESVTGLFVKKIKL

SEQ ID NO: 327 - protein, 1333 aa, Planococcus antarcticus
MKNYTIGLDIGVASVGWVCIDENYKILNYNNRHAFGVHEFESAESAAGRRLKRGMRRRYNRRKKRLQLLQSLFDSYITDSGFFSKTDSQHFWKNNNEFENRSLTEVLSSLRISSRKYPTIYHLRSDLIESNKKMDLRLVYLALHNLVKYRGHFLQEGNWSEAASAEGMDDQLLELVTRYAELENLSPLDLSESQWKAAETLLLNRNLTKTDQSKELTAMFGKEYEPFCKLVAGLGVSLHQLFPSSEQALAYKETKTKVQLSNENVEEVMELLLEEESALLEAVQPFYQQVVLYELLKGETYVAKAKVSAFKQYQKDMASLKNLLDKTFGEKVYRSYFISDKNSQREYQKSHKVEVLCKLDQFNKEAKFAETFYKDLKKLLEDKSKTSIGTTEKDEMLRIIKAIDSNQFLQKQKGIQNAAIPHQNSLYEAEKILRNQQAHYPFITTEWIEKVKQILAFRIPYYIGPLVKDTTQSPFSWVERKGDAPITPWNFDEQIDKAASAEAFISRMRKTCTYLKGQEVLPKSSLTYERFEVLNELNGIQLRTTGAESDFRHRLSYEMKCWIIDNVFKQYKTVSTKRLLQELKKSPYADELYDEHTGEIKEVFGTQKENAFATSLSGYISMKSILGAVVDDNPAMTEELIYWIAVFEDREILHLKIQEKYPSITDVQRQKLALVKLPGWGRFSRLLIDGLPLDEQGQSVLDHMEQYSSVFMEVLKNKGFGLEKKIQKMNQHQVDGTKKIRYEDIEELAGSPALKRGIWRSVKIVEELVSIFGEPANIVLEVAREDGEKKRTKSRKDQWEELTKTTLKNDPDLKSFIGEIKSQGDQRFNEQRFWLYVTQQGKCLYTGKALDIQNLSMYEVDHILPQNFVKDDSLDNLALVMPEANQRKNQVGQNKMPLEIIEANQQYAMRTLWERLHELKLISSGKLGRLKKPSFDEVDKDKFIARQLVETRQIIKHVRDLLDERFSKSDIHLVKAGIVSKFRRFSEIPKIRDYNNKHHAMDALFAAALIQSILGKYGKNFLAFDLSKKDRQKQWRSVKGSNKEFFLFKNFGNLRLQSPVTGEEVSGVEYMKHVYFELPWQTTKMTQTGDGMFYKESIFSPKVKQAKYVSPKTEKFVHDEVKNHSICLVEFTFMKKEKEVQETKFIDLKVIEHHQFLKEPESQLAKFLAEKETNSPIIHARIIRTIPKYQKIWIEHFPYYFISTRELHNARQFEISYELMEKVKQLSERSSVEELKIVFGLLIDQMNDNYPIYTKSSIQDRVQKFVDTQLYDFKSFEIGFEELKKAVAANAQRSDTFGSRISKKPKPEEVAIGYESITGLKYRKPRSVVGTKR

SEQ ID NO: 328 - protein, 1395 aa, Treponema denticola
MKKEIKDYFLGLDVGTGSVGWAVTDTDYKLLKANRKDLWGMRCFETAETAEVRRLHRGARRRIERRKKRIKLLQELFSQEIAKTDEGFFQRMKESPFYAEDKTILQENTLFNDKDFADKTYHKAYPTINHLIKAWIENKVKPDPRLLYLACHNIIKKRGHFLFEGDFDSENQFDTSIQALFEYLREDMEVDIDADSQKVKEILKDSSLKNSEKQSRLNKILGLKPSDKQKKAITNLISGNKINFADLYDNPDLKDAEKNSISFSKDDFDALSDDLASILGDSFELLLKAKAVYNCSVLSKVIGDEQYLSFAKVKIYEKHKTDLTKLKNVIKKHFPKDYKKVFGYNKNEKNNNNYSGYVGVCKTKSKKLIINNSVNQEDFYKFLKTILSAKSEIKEVNDILTEIETGTFLPKQISKSNAEIPYQLRKMELEKILSNAEKHFSFLKQKDEKGLSHSEKIIMLLTFKIPYYIGPINDNHKKFFPDRCWVVKKEKSPSGKTTPWNFFDHIDKEKTAEAFITSRTNFCTYLVGESVLPKSSLLYSEYTVLNEINNLQIIIDGKNICDIKLKQKIYEDLFKKYKKITQKQISTFIKHEGICNKTDEVIILGIDKECTSSLKSYIELKNIFGKQVDEISTKNMLEEIIRWATIYDEGEGKTILKTKIKAEYGKYCSDEQIKKILNLKFSGWGRLSRKFLETVTSEMPGFSEPVNIITAMRETQNNLMELLSSEFTFTENIKKINSGFEDAEKQFSYDGLVKPLFLSPSVKKMLWQTLKLVKEISHITQAPPKKIFIEMAKGAELEPARTKTRLKILQDLYNNCKNDADAFSSEIKDLSGKIENEDNLRLRSDKLYLYYTQLGKCMYCGKPIEIGHVFDTSNYDIDHIYPQSKIKDDSISNRVLVCSSCNKNKEDKYPLKSEIQSKQRGFWNFLQRNNFISLEKLNRLTRATPISDDETAKFIARQLVETRQATKVAAKVLEKMFPETKIVYSKAETVSMFRNKFDIVKCREINDFHHAHDAYLNIVVGNVYNTKFTNNPWNFIKEKRDNPKIADTYNYYKVFDYDVKRNNITAWEKGKTIITVKDMLKRNTPIYTRQAACKKGELFNQTIMKKGLGQHPLKKEGPFSNISKYGGYNKVSAAYYTLIEYEEKGNKIRSLETIPLYLVKDIQKDQDVLKSYLTDLLGKKEFKILVPKIKINSLLKINGFPCHITGKTNDSFLLRPAVQFCCSNNEVLYFKKIIRFSEIRSQREKIGKTISPYEDLSFRSYIKENLWKKTKNDEIGEKEFYDLLQKKNLEIYDMLLTKHKDTIYKKRPNSATIDILVKGKEKFKSLIIENQFEVILEILKLFSATRNVSDLQHIGGSKYSGVAKIGNKISSLDNCILIYQSITGIFEKRIDLLKV

SEQ ID NO: 329 - protein, 1327 aa, Solobacterium moorei
MEGQMKNNGNNLQQGNYYLGLDVGTSSVGWAVTDTDYNVLKFRGKSMWGARLFDEASTAEERRTHRGNRRRLARRKYRLLLLEQLFEKEIRKIDDNFFVRLHESNLWADDKSKPSKFLLFNDTNFTDKDYLKKYPTIYHLRSDLIHNSTEHDIRLVFLALHHLIKYRGHFIYDNSANGDVKTLDEAVSDFEEYLNENDIEFNIENKKEFINVLSDKHLTKKEKKISLKKLYGDITDSENINISVLIEMLSGSSISLSNLFKDIEFDGKQNLSLDSDIEETLNDVVDILGDNIDLLIHAKEVYDIAVLTSSLGKHKYLCDAKVELFEKNKKDLMILKKYIKKNHPEDYKKIFSSPTEKKNYAAYSQTNSKNVCSQEEFCLFIKPYIRDMVKSENEDEVRIAKEVEDKSFLTKLKGTNNSVVPYQIHERELNQILKNIVAYLPFMNDEQEDISVVDKIKLIFKFKIPYYVGPLNTKSTRSWVYRSDEKIYPWNFSNVIDLDKTAHEFMNRLIGRCTYTNDPVLPMDSLLYSKYNVLNEINPIKVNGKAIPVEVKQAIYTDLFENSKKKVTRKSIYIYLLKNGYIEKEDIVSGIDIEIKSKLKSHHDFTQIVQENKCTPEEIERIIKGILVYSDDKSMLRRWLKNNIKGLSENDVKYLAKLNYKEWGRLSKTLLTDIYTINPEDGEACSILDIMWNTNATLMEILSNEKYQFKQNIENYKAENYDEKQNLHEELDDMYISPAARRSIWQALRIVDEIVDIKKSAPKKIFIEMAREKKSAMKKKRTESRKDTLLELYKSCKSQADGFYDEELFEKLSNESNSRLRRDQLYLYYTQMGRSMYTGKRIDFDKLINDKNTYDIDHIYPRSKIKDDSITNRVLVEKDINGEKTDIYPISEDIRQKMQPFWKILKEKGLINEEKYKRLTRNYELTDEELSSFVARQLVETQQSTKALATLLKKEYPSAKIVYSKAGNVSEFRNRKDKELPKFREINDLHHAKDAYLNIVVGNVYDTKFTEKFFNNIRNENYSLKRVFDFSVPGAWDAKGSTFNTIKKYMAKNNPIIAFAPYEVKGELFDQQIVPKGKGQFPIKQGKDIEKYGGYNKLSSAFLFAVEYKGKKARERSLETVYIKDVELYLQDPIKYCESVLGLKEPQIIKPKILMGSLFSINNKKLVVTGRSGKQYVCHHIYQLSINDEDSQYLKNIAKYLQEEPDGNIERQNILNITSVNNIKLFDVLCTKFNSNTYEIILNSLKNDVNEGREKFSELDILEQCNILLQLLKAFKCNRESSNLEKLNNKKQAGVIVIPHLFTKCSVFKVIHQSITGLFEKEMDLLK

SEQ ID NO: 330 - protein, 1334 aa, Staphylococcus pseudintermedius
MGRKPYILSLDIGTGSVGYACMDKGFNVLKYHDKDALGVYLFDGALTAQERRQFRTSRRRKNRRIKRLGLLQELLAPLVQNPNFYQFQRQFAWKNDNMDFKNKSLSEVLSFLGYESKKYPTIYHLQEALLLKDEKFDPELIYMALYHLVKYRGHFLFDHLKIENLTNNDNMHDFVELIETYENLNNIKLNLDYEKTKVIYEILKDNEMTKNDRAKRVKNMEKKLEQFSIMLLGLKFNEGKLFNHADNAEELKGANQSHTFADNYEENLTPFLTVEQSEFIERANKIYLSLTLQDILKGKKSMAMSKVAAYDKFRNELKQVKDIVYKADSTRTQFKKIFVSSKKSLKQYDATPNDQTFSSLCLFDQYLIRPKKQYSLLIKELKKIIPQDSELYFEAENDTLLKVLNTTDNASIPMQINLYEAETILRNQQKYHAEITDEMIEKVLSLIQFRIPYYVGPLVNDHTASKFGWMERKSNESIKPWNFDEVVDRSKSATQFIRRMTNKCSYLINEDVLPKNSLLYQEMEVLNELNATQIRLQTDPKNRKYRMMPQIKLFAVEHIFKKYKTVSHSKFLEIMLNSNHRENFMNHGEKLSIFGTQDDKKFASKLSSYQDMTKIFGDIEGKRAQIEEIIQWITIFEDKKILVQKLKECYPELTSKQINQLKKLNYSGWGRLSEKLLTHAYQGHSIIELLRHSDENFMEILTNDVYGFQNFIKEENQVQSNKIQHQDIANLTTSPALKKGIWSTIKLVRELTSIFGEPEKIIMEFATEDQQKGKKQKSRKQLWDDNIKKNKLKSVDEYKYIIDVANKLNNEQLQQEKLWLYLSQNGKCMYSGQSIDLDALLSPNATKHYEVDHIFPRSFIKDDSIDNKVLVIKKMNQTKGDQVPLQFIQQPYERIAYWKSLNKAGLISDSKLHKLMKPEFTAMDKEGFIQRQLVETRQISVHVRDFLKEEYPNTKVIPMKAKMVSEFRKKFDIPKIRQMNDAHHAIDAYLNGVVYHGAQLAYPNVDLFDFNFKWEKVREKWKALGEFNTKQKSRELFFFKKLEKMEVSQGERLISKIKLDMNHFKINYSRKLANIPQQFYNQTAVSPKTAELKYESNKSNEVVYKGLTPYQTYVVAIKSVNKKGKEKMEYQMIDHYVFDFYKFQNGNEKELALYLAQRENKDEVLDAQIVYSLNKGDLLYINNHPCYFVSRKEVINAKQFELTVEQQLSLYNVMNNKETNVEKLLIEYDFIAEKVINEYHHYLNSKLKEKRVRTFFSESNQTHEDFIKALDELFKVVTASATRSDKIGSRKNSMTHRAFLGKGKDVKIAYTSISGLKTTKPKSLFKLAESRNEL

SEQ ID NO: 331 - protein, 1472 aa, Flavobacterium branchiophilum
MAKILGLDLGTNSIGWAVVERENIDFSLIDKGVRIFSEGVKSEKGIESSRAAERTGYRSARKIKYRRKLRKYETLKVLSLNRMCPLSIEEVEEWKKSGFKDYPLNPEFLKWLSTDEESNVNPYFFRDRASKHKVSLFELGRAFYHIAQRRGFLSNRLDQSAEGILEEHCPKIEAIVEDLISIDEISTNITDYFFETGILDSNEKNGYAKDLDEGDKKLVSLYKSLLAILKKNESDFENCKSEIIERLNKKDVLGKVKGKIKDISQAMLDGNYKTLGQYFYSLYSKEKIRNQYTSREEHYLSEFITICKVQGIDQINEEEKINEKKFDGLAKDLYKAIFFQRPLKSQKGLIGKCSFEKSKSRCAISHPDFEEYRMWTYLNTIKIGTQSDKKLRFLTQDEKLKLVPKFYRKNDFNFDVLAKELIEKGSSFGFYKSSKKNDFFYWFNYKPTDTVAACQVAASLKNAIGEDWKTKSFKYQTINSNKEQVSRTVDYKDLWHLLTVATSDVYLYEFAIDKLGLDEKNAKAFSKTKLKKDFASLSLSAINKILPYLKEGLLYSHAVFVANIENIVDENIWKDEKQRDYIKTQISEIIENYTLEKSRFEIINGLLKEYKSENEDGKRVYYSKEAEQSFENDLKKKLVLFYKSNEIENKEQQETIFNELLPIFIQQLKDYEFIKIQRLDQKVLIFLKGKNETGQIFCTEEKGTAEEKEKKIKNRLKKLYHPSDIEKFKKKIIKDEFGNEKIVLGSPLTPSIKNPMAMRALHQLRKVLNALILEGQIDEKTIIHIEMARELNDANKRKGIQDYQNDNKKFREDAIKEIKKLYFEDCKKEVEPTEDDILRYQLWMEQNRSEIYEEGKNISICDIIGSNPAYDIEHTIPRSRSQDNSQMNKTLCSQRFNREVKKQSMPIELNNHLEILPRIAHWKEEADNLTREIEIISRSIKAAATKEIKDKKIRRRHYLTLKRDYLQGKYDRFIWEEPKVGFKNSQIPDTGIITKYAQAYLKSYFKKVESVKGGMVAEFRKIWGIQESFIDENGMKHYKVKDRSKHTHHTIDAITIACMTKEKYDVLAHAWTLEDQQNKKEARSIIEASKPWKTFKEDLLKIEEEILVSHYTPDNVKKQAKKIVRVRGKKQFVAEVERDVNGKAVPKKAASGKTIYKLDGEGKKLPRLQQGDTIRGSLHQDSIYGAIKNPLNTDEIKYVIRKDLESIKGSDVESIVDEVVKEKIKEAIANKVLLLSSNAQQKNKLVGTVWMNEEKRIAINKVRIYANSVKNPLHIKEHSLLSKSKHVHKQKVYGQNDENYAMAIYELDGKRDFELINIFNLAKLIKQGQGFYPLHKKKEIKGKIVFVPIEKRNKRDVVLKRGQQVVFYDKEVENPKDISEIVDFKGRIYIIEGLSIQRIVRPSGKVDEYGVIMLRYFKEARKADDIKQDNFKPDGVFKLGENKPTRKMNHQFTAFVEGIDFKVLPSGKFEKI

SEQ ID NO: 332 - protein, 1688 aa, Ignavibacterium album
MEFKKVLGLDIGTNSIGCALLSLPKSIQDYGKGGRLEWLTSRVIPLDADYMKAFIDGKNGLPQVITPAGKRRQKRGSRRLKHRYKLRRSRLIRVFKTLNWLPEDFPLDNPKRIKETISTEGKFSFRISDYVPISDESYREFYREFGYPENEIEQVIEEINFRRKTKGKNKNPMIKLLPEDWVVYYLRKKALIKPTTKEELIRIIYLFNQRRGFKSSRKDLTETAILDYDEFAKRLAEKEKYSAENYETKFVSITKVKEVVELKTDGRKGKKRFKVILEDSRIEPYEIERKEKPDWEGKEYTFLVTQKLEKGKFKQNKPDLPKEEDWALCTTALDNRMGSKHPGEFFFDELLKAFKEKRGYKIRQYPVNRWRYKKELEFIWTKQCQLNPELNNLNINKEILRKLATVLYPSQSKFFGPKIKEFENSDVLHIISEDIIYYQRDLKSQKSLISECRYEKRKGIDGEIYGLKCIPKSSPLYQEFRIWQDIHNIKVIRKESEVNGKKKINIDETQLYINENIKEKLFELFNSKDSLSEKDILELISLNIINSGIKISKKEEETTHRINLFANRKELKGNETKSRYRKVFKKLGFDGEYILNHPSKLNRLWHSDYSNDYADKEKTEKSILSSLGWKNRNGKWEKSKNYDVFNLPLEVAKAIANLPPLKKEYGSYSALAIRKMLVVMRDGKYWQHPDQIAKDQENTSLMLFDKNLIQLTNNQRKVLNKYLLTLAEVQKRSTLIKQKLNEIEHNPYKLELVSDQDLEKQVLKSFLEKKNESDYLKGLKTYQAGYLIYGKHSEKDVPIVNSPDELGEYIRKKLPNNSLRNPIVEQVIRETIFIVRDVWKSFGIIDEIHIELGRELKNNSEERKKTSESQEKNFQEKERARKLLKELLNSSNFEHYDENGNKIFSSFTVNPNPDSPLDIEKFRIWKNQSGLTDEELNKKLKDEKIPTEIEVKKYILWLTQKCRSPYTGKIIPLSKLFDSNVYEIEHIIPRSKMKNDSTNNLVICELGVNKAKGDRLAANFISESNGKCKFGEVEYTLLKYGDYLQYCKDTFKYQKAKYKNLLATEPPEDFIERQINDTRYIGRKLAELLTPVVKDSKNIIFTIGSITSELKITWGLNGVWKDILRPRFKRLESIINKKLIFQDEDDPNKYHFDLSINPQLDKEGLKRLDHRHHALDATIIAATTREHVRYLNSLNAADNDEEKREYFLSLCNHKIRDFKLPWENFTSEVKSKLLSCVVSYKESKPILSDPFNKYLKWEYKNGKWQKVFAIQIKNDRWKAVRRSMFKEPIGTVWIKKIKEVSLKEAIKIQAIWEEVKNDPVRKKKEKYIYDDYAQKVIAKIVQELGLSSSMRKQDDEKLNKFINEAKVSAGVNKNLNTTNKTIYNLEGRFYEKIKVAEYVLYKAKRMPLNKKEYIEKLSLQKMFNDLPNFILEKSILDNYPEILKELESDNKYIIEPHKKNNPVNRLLLEHILEYHNNPKEAFSTEGLEKLNKKAINKIGKPIKYITRLDGDINEEEIFRGAVFETDKGSNVYFVMYENNQTKDREFLKPNPSISVLKAIEHKNKIDFFAPNRLGFSRIILSPGDLVYVPTNDQYVLIKDNSSNETIINWDDNEFISNRIYQVKKFTGNSCYFLKNDIASLILSYSASNGVGEFGSQNISEYSVDDPPIRIKDVCIKIRVDRLGNVRPL

SEQ ID NO: 333 - protein, 1415 aa, Bergeyella zoohelcum
MKHILGLDLGTNSIGWALIERNIEEKYGKIIGMGSRIVPMGAELSKFEQGQAQTKNADRRTNRGARRLNKRYKQRRNKLIYILQKLDMLPSQIKLKEDFSDPNKIDKITILPISKKQEQLTAFDLVSLRVKALTEKVGLEDLGKIIYKYNQLRGYAGGSLEPEKEDIFDEEQSKDKKNKSFIAFSKIVFLGEPQEEIFKNKKLNRRAIIVETEEGNFEGSTFLENIKVGDSLELLINISASKSGDTITIKLPNKTNWRKKMENIENQLKEKSKEMGREFYISEFLLELLKENRWAKIRNNTILRARYESEFEAIWNEQVKHYPFLENLDKKTLIEIVSFIFPGEKESQKKYRELGLEKGLKYIIKNQVVFYQRELKDQSHLISDCRYEPNEKAIAKSHPVFQEYKVWEQINKLIVNTKIEAGTNRKGEKKYKYIDRPIPTALKEWIFEELQNKKEITFSAIFKKLKAEFDLREGIDFLNGMSPKDKLKGNETKLQLQKSLGELWDVLGLDSINRQIELWNILYNEKGNEYDLTSDRTSKVLEFINKYGNNIVDDNAEETAIRISKIKFARAYSSLSLKAVERILPLVRAGKYFNNDFSQQLQSKILKLLNENVEDPFAKAAQTYLDNNQSVLSEGGVGNSIATILVYDKHTAKEYSHDELYKSYKEINLLKQGDLRNPLVEQIINEALVLIRDIWKNYGIKPNEIRVELARDLKNSAKERATIHKRNKDNQTINNKIKETLVKNKKELSLANIEKVKLWEAQRHLSPYTGQPIPLSDLFDKEKYDVDHIIPISRYFDDSFTNKVISEKSVNQEKANRTAMEYFEVGSLKYSIFTKEQFIAHVNEYFSGVKRKNLLATSIPEDPVQRQIKDTQYIAIRVKEELNKIVGNENVKTTTGSITDYLRNHWGLTDKFKLLLKERYEALLESEKFLEAEYDNYKKDFDSRKKEYEEKEVLFEEQELTREEFIKEYKENYIRYKKNKLIIKGWSKRIDHRHHAIDALIVACTEPAHIKRLNDLNKVLQDWLVEHKSEFMPNFEGSNSELLEEILSLPENERTEIFTQIEKFRAIEMPWKGFPEQVEQKLKEIIISHKPKDKLLLQYNKAGDRQIKLRGQLHEGTLYGISQGKEAYRIPLTKFGGSKFATEKNIQKIVSPFLSGFIANHLKEYNNKKEEAFSAEGIMDLNNKLAQYRNEKGELKPHTPISTVKIYYKDPSKNKKKKDEEDLSLQKLDREKAFNEKLYVKTGDNYLFAVLEGEIKTKKTSQIKRLYDIISFFDATNFLKEEFRNAPDKKTFDKDLLFRQYFEERNKAKLLFTLKQGDFVYLPNENEEVILDKESPLYNQYWGDLKERGKNIYVVQKFSKKQIYFIKHTIADIIKKDVEFGSQNCYETVEGRSIKENCFKLEIDRLGNIVKVIKR

SEQ ID NO: 334 - protein, 1166 aa, Nitrobacter hamburgensis
MHVEIDFPHFSRGDSHLAMNKNEILRGSSVLYRLGLDLGSNSLGWFVTHLEKRGDRHEPVALGPGGVRIFPDGRDPQSGTSNAVDRRMARGARKRRDRFVERRKELIAALIKYNLLPDDARERRALEVLDPYALRKTALTDTLPAHHVGRALFHLNQRRGFQSNRKTDSKQSEDGAIKQAASRLATDKGNETLGVFFADMHLRKSYEDRQTAIRAELVRLGKDHLTGNARKKIWAKVRKRLFGDEVLPRADAPHGVRARATITGTKASYDYYPTRDMLRDEFNAIWAGQSAHHATITDEARTEIEHIIFYQRPLKPAIVGKCTLDPATRPFKEDPEGYRAPWSHPLAQRFRILSEARNLEIRDTGKGSRRLTKEQSDLVVAALLANREVKFDKLRTLLKLPAEARFNLESDRRAALDGDQTAARLSDKKGFNKAWRGFPPERQIAIVARLEETEDENELIAWLEKECALDGAAAARVANTTLPDGHCRLGLRAIKKIVPIMQDGLDEDGVAGAGYHIAAKRAGYDHAKLPTGEQLGRLPYYGQWLQDAVVGSGDARDQKEKQYGQFPNPTVHIGLGQLRRVVNDLIDKYGPPTEISIEFTRALKLSEQQKAERQREQRRNQDKNKARAEELAKFGRPANPRNLLKMRLWEELAHDPLDRKCVYTGEQISIERLLSDEVDIDHILPVAMTLDDSPANKIICMRYANRHKRKQTPSEAFGSSPTLQGHRYNWDDIAARATGLPRNKRWRFDANAREEFDKRGGFLARQLNETGWLARLAKQYLGAVTDPNQIWVVPGRLTSMLRGKWGLNGLLPSDNYAGVQDKAEEFLASTDDMEFSGVKNRADHRHHAIDGLVTALTDRSLLWKMANAYDEEHEKFVIEPPWPTMRDDLKAALEKMVVSHKPDHGIEGKLHEDSAYGFVKPLDATGLKEEEAGNLVYRKAIESLNENEVDRIRDIQLRTIVRDHVNVEKTKGVALADALRQLQAPSDDYPQFKHGLRHVRILKKEKGDYLVPIANRASGVAYKAYSAGENFCVEVFETAGGKWDGEAVRRFDANKKNAGPKIAHAPQWRDANEGAKLVMRIHKGDLIRLDHEGRARIMVVHRLDAAAGRFKLADHNETGNLDKRHATNNDIDPFRWLMASYNTLKKLAAVPVRVDELGRVWRVMPN

SEQ ID NO: 335 - protein, 1498 aa, Odoribacter laneus
METTLGIDLGTNSIGLALVDQEEHQILYSGVRIFPEGINKDTIGLGEKEESRNATRRAKRQMRRQYFRKKLRKAKLLELLIAYDMCPLKPEDVRRWKNWDKQQKSTVRQFPDTPAFREWLKQNPYELRKQAVTEDVTRPELGRILYQMIQRRGFLSSRKGKEEGKIFTGKDRMVGIDETRKNLQKQTLGAYLYDIAPKNGEKYRFRTERVRARYTLRDMYIREFEIIWQRQAGHLGLAHEQATRKKNIFLEGSATNVRNSKLITHLQAKYGRGHVLIEDTRITVTFQLPLKEVLGGKIEIEEEQLKFKSNESVLFWQRPLRSQKSLLSKCVFEGRNFYDPVHQKWIIAGPTPAPLSHPEFEEFRAYQFINNIIYGKNEHLTAIQREAVFELMCTESKDFNFEKIPKHLKLFEKFNFDDTTKVPACTTISQLRKLFPHPVWEEKREEIWHCFYFYDDNTLLFEKLQKDYALQTNDLEKIKKIRLSESYGNVSLKAIRRINPYLKKGYAYSTAVLLGGIRNSFGKRFEYFKEYEPEIEKAVCRILKEKNAEGEVIRKIKDYLVHNRFGFAKNDRAFQKLYHHSQAITTQAQKERLPETGNLRNPIVQQGLNELRRTVNKLLATCREKYGPSFKFDHIHVEMGRELRSSKTEREKQSRQIRENEKKNEAAKVKLAEYGLKAYRDNIQKYLLYKEIEEKGGTVCCPYTGKTLNISHTLGSDNSVQIEHIIPYSISLDDSLANKTLCDATFNREKGELTPYDFYQKDPSPEKWGASSWEEIEDRAFRLLPYAKAQRFIRRKPQESNEFISRQLNDTRYISKKAVEYLSAICSDVKAFPGQLTAELRHLWGLNNILQSAPDITFPLPVSATENHREYYVITNEQNEVIRLFPKQGETPRTEKGELLLTGEVERKVFRCKGMQEFQTDVSDGKYWRRIKLSSSVTWSPLFAPKPISADGQIVLKGRIEKGVFVCNQLKQKLKTGLPDGSYWISLPVISQTFKEGESVNNSKLTSQQVQLFGRVREGIFRCHNYQCPASGADGNFWCTLDTDTAQPAFTPIKNAPPGVGGGQIILTGDVDDKGIFHADDDLHYELPASLPKGKYYGIFTVESCDPTLIPIELSAPKTSKGENLIEGNIWVDEHTGEVRFDPKKNREDQRHHAIDAIVIALSSQSLFQRLSTYNARRENKKRGLDSTEHFPSPWPGFAQDVRQSVVPLLVSYKQNPKTLCKISKTLYKDGKKIHSCGNAVRGQLHKETVYGQRTAPGATEKSYHIRKDIRELKTSKHIGKVVDITIRQMLLKHLQENYHIDITQEFNIPSNAFFKEGVYRIFLPNKHGEPVPIKKIRMKEELGNAERLKDNINQYVNPRNNHHVMIYQDADGNLKEEIVSFWSVIERQNQGQPIYQLPREGRNIVSILQINDTFLIGLKEEEPEVYRNDLSTLSKHLYRVQKLSGMYYTFRHHLASTLNNEREEFRIQSLEAWKRANPVKVQIDEIGRITFLNGPLC

SEQ ID NO: 336 - protein, 1372 aa, Legionella pneumophila
MESSQILSPIGIDLGGKFTGVCLSHLEAFAELPNHANTKYSVILIDHNNFQLSQAQRRATRHRVRNKKRNQFVKRVALQLFQHILSRDLNAKEETALCHYLNNRGYTYVDTDLDEYIKDETTINLLKELLPSESEHNFIDWFLQKMQSSEFRKILVSKVEEKKDDKELKNAVKNIKNFITGFEKNSVEGHRHRKVYFENIKSDITKDNQLDSIKKKIPSVCLSNLLGHLSNLQWKNLHRYLAKNPKQFDEQTFGNEFLRMLKNFRHLKGSQESLAVRNLIQQLEQSQDYISILEKTPPEITIPPYEARTNTGMEKDQSLLLNPEKLNNLYPNWRNLIPGIIDAHPFLEKDLEHTKLRDRKRIISPSKQDEKRDSYILQRYLDLNKKIDKFKIKKQLSFLGQGKQLPANLIETQKEMETHFNSSLVSVLIQIASAYNKEREDAAQGIWFDNAFSLCELSNINPPRKQKILPLLVGAILSEDFINNKDKWAKFKIFWNTHKIGRTSLKSKCKEIEEARKNSGNAFKIDYEEALNHPEHSNNKALIKIIQTIPDIIQAIQSHLGHNDSQALIYHNPFSLSQLYTILETKRDGFHKNCVAVTCENYWRSQKTEIDPEISYASRLPADSVRPFDGVLARMMQRLAYEIAMAKWEQIKHIPDNSSLLIPIYLEQNRFEFEESFKKIKGSSSDKTLEQAIEKQNIQWEEKFQRIINASMNICPYKGASIGGQGEIDHIYPRSLSKKHFGVIFNSEVNLIYCSSQGNREKKEEHYLLEHLSPLYLKHQFGTDNVSDIKNFISQNVANIKKYISFHLLTPEQQKAARHALFLDYDDEAFKTITKFLMSQQKARVNGTQKFLGKQIMEFLSTLADSKQLQLEFSIKQITAEEVHDHRELLSKQEPKLVKSRQQSFPSHAIDATLTMSIGLKEFPQFSQELDNSWFINHLMPDEVHLNPVRSKEKYNKPNISSTPLFKDSLYAERFIPVWVKGETFAIGFSEKDLFEIKPSNKEKLFTLLKTYSTKNPGESLQELQAKSKAKWLYFPINKTLALEFLHHYFHKEIVTPDDTTVCHFINSLRYYTKKESITVKILKEPMPVLSVKFESSKKNVLGSFKHTIALPATKDWERLFNHPNFLALKANPAPNPKEFNEFIRKYFLSDNNPNSDIPNNGHNIKPQKHKAVRKVFSLPVIPGNAGTMMRIRRKDNKGQPLYQLQTIDDTPSMGIQINEDRLVKQEVLMDAYKTRNLSTIDGINNSEGQAYATFDNWLTLPVSTFKPEIIKLEMKPHSKTRRYIRITQSLADFIKTIDEALMIKPSDSIDDPLNMPNEIVCKNKLFGNELKPRDGKMKIVSTGKIVTYEFESDSTPQWIQTLYVTQLKKQP

SEQ ID NO: 337 - protein, 1517 aa, Bacteroides sp.
MKKIVGLDLGTNSIGWALINAYINKEHLYGIEACGSRIIPMDAAILGNFDKGNSISQTADRTSYRGIRRLRERHLLRRERLHRILDLLGFLPKHYSDSLNRYGKFLNDIECKLPWVKDETGSYKFIFQESFKEMLANFTEHHPILIANNKKVPYDWTIYYLRKKALTQKISKEELAWILLNFNQKRGYYQLRGEEEETPNKLVEYYSLKVEKVEDSGERKGKDTWYNVHLENGMIYRRTSNIPLDWEGKTKEFIVTTDLEADGSPKKDKEGNIKRSFRAPKDDDWTLIKKKTEADIDKIKMTVGAYIYDTLLQKPDQKIRGKLVRTIERKYYKNELYQILKTQSEFHEELRDKQLYIACLNELYPNNEPRRNSISTRDFCHLFIEDIIFYQRPLKSKKSLIDNCPYEENRYIDKESGEIKHASIKCIAKSHPLYQEFRLWQFIVNLRIYRKETDVDVTQELLPTEADYVTLFEWLNEKKEIDQKAFFKYPPFGFKKTTSNYRWNYVEDKPYPCNETHAQIIARLGKAHIPKAFLSKEKEETLWHILYSIEDKQEIEKALHSFANKNNLSEEFIEQFKNFPPFKKEYGSYSAKAIKKLLPLMRMGKYWSIENIDNGTRIRINKIIDGEYDENIRERVRQKAINLTDITHFRALPLWLACYLVYDRHSEVKDIVKWKTPKDIDLYLKSFKQHSLRNPIVEQVITETLRTVRDIWQQVGHIDEIHIELGREMKNPADKRARMSQQMIKNENTNLRIKALLTEFLNPEFGIENVRPYSPSQQDLLRIYEEGVLNSILELPEDIGIILGKFNQTDTLKRPTRSEILRYKLWLEQKYRSPYTGEMIPLSKLFTPAYEIEHIIPQSRYFDDSLSNKVICESEINKLKDRSLGYEFIKNHHGEKVELAFDKPVEVLSVEAYEKLVHESYSHNRSKMKKLLMEDIPDQFIERQLNDSRYISKVVKSLLSNIVREENEQEAISKNVIPCTGGITDRLKKDWGINDVWNKIVLPRFIRLNELTESTRFTSINTNNTMIPSMPLELQKGFNKKRIDHRHHAMDAIIIACANRNIVNYLNNVSASKNTKITRRDLQTLLCHKDKTDNNGNYKWVIDKPWETFTQDTLTALQKITVSFKQNLRVINKTTNHYQHYENGKKIVSNQSKGDSWAIRKSMHKETVHGEVNLRMIKTVSFNEALKKPQAIVEMDLKKKILAMLELGYDTKRIKNYFEENKDTWQDINPSKIKVYYFTKETKDRYFAVRKPIDTSFDKKKIKESITDTGIQQIMLRHLETKDNDPTLAFSPDGIDEMNRNILILNKGKKHQPIYKVRVYEKAEKFTVGQKGNKRTKFVEAAKGTNLFFAIYETEEIDKDTKKVIRKRSYSTIPLNVVIERQKQGLSSAPEDENGNLPKYILSPNDLVYVPTQEEINKGEVVMPIDRDRIYKMVDSSGITANFIPASTANLIFALPKATAEIYCNGENCIQNEYGIGSPQSKNQKAITGEMVKEICFPIKVDRLGNIIQVGSCILTN

SEQ ID NO: 338 - protein, 1101 aa, Akkermansia muciniphila
MSRSLTFSFDIGYASIGWAVIASASHDDADPSVCGCGTVLFPKDDCQAFKRREYRRLRRNIRSRRVRIERIGRLLVQAQIITPEMKETSGHPAPFYLASEALKGHRTLAPIELWHVLRWYAHNRGYDNNASWSNSLSEDGGNGEDTERVKHAQDLMDKHGTATMAETICRELKLEEGKADAPMEVSTPAYKNLNTAFPRLIVEKEVRRILELSAPLIPGLTAEIIELIAQHHPLTTEQRGVLLQHGIKLARRYRGSLLFGQLIPRFDNRIISRCPVTWAQVYEAELKKGNSEQSARERAEKLSKVPTANCPEFYEYRMARILCNIRADGEPLSAEIRRELMNQARQEGKLTKASLEKAISSRLGKETETNVSNYFTLHPDSEEALYLNPAVEVLQRSGIGQILSPSVYRIAANRLRRGKSVTPNYLLNLLKSRGESGEALEKKIEKESKKKEADYADTPLKPKYATGRAPYARTVLKKVVEEILDGEDPTRPARGEAHPDGELKAHDGCLYCLLDTDSSVNQHQKERRLDTMTNNHLVRHRMLILDRLLKDLIQDFADGQKDRISRVCVEVGKELTTFSAMDSKKIQRELTLRQKSHTDAVNRLKRKLPGKALSANLIRKCRIAMDMNWTCPFTGATYGDHELENLELEHIVPHSFRQSNALSSLVLTWPGVNRMKGQRTGYDFVEQEQENPVPDKPNLHICSLNNYRELVEKLDDKKGHEDDRRRKKKRKALLMVRGLSHKHQSQNHEAMKEIGMTEGMMTQSSHLMKLACKSIKTSLPDAHIDMIPGAVTAEVRKAWDVFGVFKELCPEAADPDSGKILKENLRSLTHLHHALDACVLGLIPYIIPAHHNGLLRRVLAMRRIPEKLIPQVRPVANQRHYVLNDDGRMMLRDLSASLKENIREQLMEQRVIQHVPADMGGALLKETMQRVLSVDGSGEDAMVSLSKKKDGKKEKNQVKASKLVGVFPEGPSKLKALKAAIEIDGNYGVALDPKPVVIRHIKVFKRIMALKEQNGGKPVRILKKGMLIHLTSSKDPKHAGVWRIESIQDSKGGVKLDLQRAHCAVPKNKTHECNWREVDLISLLKKYQMKRYPTSYTGTPR

SEQ ID NO: 339 - protein, 1424 aa, Prevotella sp.
MTQKVLGLDLGTNSIGSAVRNLDLSDDLQWQLEFFSSDIFRSSVNKESNGREYSLAAQRSAHRRSRGLNEVRRRRLWATLNLLIKHGFCPMSSESLMRWCTYDKRKGLFREYPIDDKDFNAWILLDFNGDGRPDYSSPYQLRRELVTRQFDFEQPIERYKLGRALYHIAQHRGFKSSKGETLSQQETNSKPSSTDEIPDVAGAMKASEEKLSKGLSTYMKEHNLLTVGAAFAQLEDEGVRVRNNNDYRAIRSQFQHEIETIFKFQQGLSVESELYERLISEKKNVGTIFYKRPLRSQRGNVGKCTLERSKPRCAIGHPLFEKFRAWTLINNIKVRMSVDTLDEQLPMKLRLDLYNECFLAFVRTEFKFEDIRKYLEKRLGIHFSYNDKTINYKDSTSVAGCPITARFRKMLGEEWESFRVEGQKERQAHSKNNISFHRVSYSIEDIWHFCYDAEEPEAVLAFAQETLRLERKKAEELVRIWSAMPQGYAMLSQKAIRNINKILMLGLKYSDAVILAKVPELVDVSDEELLSIAKDYYLVEAQVNYDKRINSIVNGLIAKYKSVSEEYRFADHNYEYLLDESDEKDIIRQIENSLGARRWSLMDANEQTDILQKVRDRYQDFFRSHERKFVESPKLGESFENYLTKKFPMVEREQWKKLYHPSQITIYRPVSVGKDRSVLRLGNPDIGAIKNPTVLRVLNTLRRRVNQLLDDGVISPDETRVVVETARELNDANRKWALDTYNRIRHDENEKIKKILEEFYPKRDGISTDDIDKARYVIDQREVDYFTGSKTYNKDIKKYKFWLEQGGQCMYTGRTINLSNLFDPNAFDIEHTIPESLSFDSSDMNLTLCDAHYNRFIKKNHIPTDMPNYDKAITIDGKEYPAITSQLQRWVERVERLNRNVEYWKGQARRAQNKDRKDQCMREMHLWKMELEYWKKKLERFTVTEVTDGFKNSQLVDTRVITRHAVLYLKSIFPHVDVQRGDVTAKFRKILGIQSVDEKKDRSLHSHHAIDATTLTIIPVSAKRDRMLELFAKIEEINKMLSFSGSEDRTGLIQELEGLKNKLQMEVKVCRIGHNVSEIGTFINDNIIVNHHIKNQALTPVRRRLRKKGYIVGGVDNPRWQTGDALRGEIHKASYYGAITQFAKDDEGKVLMKEGRPQVNPTIKFVIRRELKYKKSAADSGFASWDDLGKAIVDKELFALMKGQFPAETSFKDACEQGIYMIKKGKNGMPDIKLHHIRHVRCEAPQSGLKIKEQTYKSEKEYKRYFYAAVGDLYAMCCYTNGKIREFRIYSLYDVSCHRKSDIEDIPEFITDKKGNRLMLDYKLRTGDMILLYKDNPAELYDLDNVNLSRRLYKINRFESQSNLVLMTHHLSTSKERGRSLGKTVDYQNLPESIRSSVKSLNFLIMGENRDFVIKNGKIIFNHR

SEQ ID NO: 340 - protein, 1409 aa, Wolinella succinogenes
MLVSPISVDLGGKNTGFFSFTDSLDNSQSGTVIYDESFVLSQVGRRSKRHSKRNNLRNKLVKRLFLLILQEHHGLSIDVLPDEIRGLFNKRGYTYAGFELDEKKKDALESDTLKEFLSEKLQSIDRDSDVEDFLNQIASNAESFKDYKKGFEAVFASATHSPNKKLELKDELKSEYGENAKELLAGLRVTKEILDEFDKQENQGNLPRAKYFEELGEYIATNEKVKSFFDSNSLKLTDMTKLIGNISNYQLKELRRYFNDKEMEKGDIWIPNKLHKITERFVRSWHPKNDADRQRRAELMKDLKSKEIMELLTTTEPVMTIPPYDDMNNRGAVKCQTLRLNEEYLDKHLPNWRDIAKRLNHGKFNDDLADSTVKGYSEDSTLLHRLLDTSKEIDIYELRGKKPNELLVKTLGQSDANRLYGFAQNYYELIRQKVRAGIWVPVKNKDDSLNLEDNSNMLKRCNHNPPHKKNQIHNLVAGILGVKLDEAKFAEFEKELWSAKVGNKKLSAYCKNIEELRKTHGNTFKIDIEELRKKDPAELSKEEKAKLRLTDDVILNEWSQKIANFFDIDDKHRQRFNNLFSMAQLHTVIDTPRSGFSSTCKRCTAENRFRSETAFYNDETGEFHKKATATCQRLPADTQRPFSGKIERYIDKLGYELAKIKAKELEGMEAKEIKVPIILEQNAFEYEESLRKSKTGSNDRVINSKKDRDGKKLAKAKENAEDRLKDKDKRIKAFSSGICPYCGDTIGDDGEIDHILPRSHTLKIYGTVFNPEGNLIYVHQKCNQAKADSIYKLSDIKAGVSAQWIEEQVANIKGYKTFSVLSAEQQKAFRYALFLQNDNEAYKKVVDWLRTDQSARVNGTQKYLAKKIQEKLTKMLPNKHLSFEFILADATEVSELRRQYARQNPLLAKAEKQAPSSHAIDAVMAFVARYQKVFKDGTPPNADEVAKLAMLDSWNPASNEPLTKGLSTNQKIEKMIKSGDYGQKNMREVFGKSIFGENAIGERYKPIVVQEGGYYIGYPATVKKGYELKNCKVVTSKNDIAKLEKIIKNQDLISLKENQYIKIFSINKQTISELSNRYFNMNYKNLVERDKEIVGLLEFIVENCRYYTKKVDVKFAPKYIHETKYPFYDDWRRFDEAWRYLQENQNKTSSKDRFVIDKSSLNEYYQPDKNEYKLDVDTQPIWDDFCRWYFLDRYKTANDKKSIRIKARKTFSLLAESGVQGKVFRAKRKIPTGYAYQALPMDNNVIAGDYANILLEANSKTLSLVPKSGISIEKQLDKKLDVIKKTDVRGLAIDNNSFFNADFDTHGIRLIVENTSVKVGNFPISAIDKSAKRMIFRALFEKEKGKRKKKTTISFKESGPVQDYLKVFLKKIVKIQLRTDGSISNIVVRKNAADFTLSFRSEHIQKLLK

SEQ ID NO: 341 - protein, 1146 aa, Alicyclobacillus hesperidum
MAYRLGLDIGITSVGWAVVALEKDESGLKPVRIQDLGVRIFDKAEDSKTGASLALPRREARSARRRTRRRRHRLWRVKRLLEQHGILSMEQIEALYAQRTSSPDVYALRVAGLDRCLIAEEIARVLIHIAHRRGFQSNRKSEIKDSDAGKLLKAVQENENLMQSKGYRTVAEMLVSEATKTDAEGKLVHGKKHGYVSNVRNKAGEYRHTVSRQAIVDEVRKIFAAQRALGNDVMSEELEDSYLKILCSQRNFDDGPGGDSPYGHGSVSPDGVRQSIYERMVGSCTFETGEKRAPRSSYSFERFQLLTKVVNLRIYRQQEDGGRYPCELTQTERARVIDCAYEQTKITYGKLRKLLDMKDTESFAGLTYGLNRSRNKTEDTVFVEMKFYHEVRKALQRAGVFIQDLSIETLDQIGWILSVWKSDDNRRKKLSTLGLSDNVIEELLPLNGSKFGHLSLKAIRKILPFLEDGYSYDVACELAGYQFQGKTEYVKQRLLPPLGEGEVTNPVVRRALSQAIKVVNAVIRKHGSPESIHIELARELSKNLDERRKIEKAQKENQKNNEQIKDEIREILGSAHVTGRDIVKYKLFKQQQEFCMYSGEKLDVTRLFEPGYAEVDHIIPYGISFDDSYDNKVLVKTEQNRQKGNRTPLEYLRDKPEQKAKFIALVESIPLSQKKKNHLLMDKRAIDLEQEGFRERNLSDTRYITRALMNHIQAWLLFDETASTRSKRVVCVNGAVTAYMRARWGLTKDRDAGDKHHAADAVVVACIGDSLIQRVTKYDKFKRNALADRNRYVQQVSKSEGITQYVDKETGEVFTWESFDERKFLPNEPLEPWPFFRDELLARLSDDPSKNIRAIGLLTYSETEQIDPIFVSRMPTRKVTGAAHKETIRSPRIVKVDDNKGTEIQVVVSKVALTELKLTKDGEIKDYFRPEDDPRLYNTLRERLVQFGGDAKAAFKEPVYKISKDGSVRTPVRKVKIQEKLTLGVPVHGGRGIAENGGMVRIDVFAKGGKYYFVPIYVADVLKRELPNRLATAHKPYSEWRVVDDSYQFKFSLYPNDAVMIKPSREVDITYKDRKEPVGCRIMYFVSANIASASISLRTHDNSGELEGLGIQGLEVFEKYVVGPLGDTHPVYKERRMPFRVERKMN

SEQ ID NO: 342 - protein, 1442 aa, Caenispirillum salinarum
MPVLSPLSPNAAQGRRRWSLALDIGEGSIGWAVAEVDAEGRVLQLTGTGVTLFPSAWSNENGTYVAHGAADRAVRGQQQRHDSRRRRLAGLARLCAPVLERSPEDLKDLTRTPPKADPRAIFFLRADAARRPLDGPELFRVLHHMAAHRGIRLAELQEVDPPPESDADDAAPAATEDEDGTRRAAADERAFRRLMAEHMHRHGTQPTCGEIMAGRLRETPAGAQPVTRARDGLRVGGGVAVPTRALIEQEFDAIRAIQAPRHPDLPWDSLRRLVLDQAPIAVPPATPCLFLEELRRRGETFQGRTITREAIDRGLTVDPLIQALRIRETVGNLRLHERITEPDGRQRYVPRAMPELGLSHGELTAPERDTLVRALMHDPDGLAAKDGRIPYTRLRKLIGYDNSPVCFAQERDTSGGGITVNPTDPLMARWIDGWVDLPLKARSLYVRDVVARGADSAALARLLAEGAHGVPPVAAAAVPAATAAILESDIMQPGRYSVCPWAAEAILDAWANAPTEGFYDVTRGLFGFAPGEIVLEDLRRARGALLAHLPRTMAAARTPNRAAQQRGPLPAYESVIPSQLITSLRRAHKGRAADWSAADPEERNPFLRTWTGNAATDHILNQVRKTANEVITKYGNRRGWDPLPSRITVELAREAKHGVIRRNEIAKENRENEGRRKKESAALDTFCQDNTVSWQAGGLPKERAALRLRLAQRQEFFCPYCAERPKLRATDLFSPAETEIDHVIERRMGGDGPDNLVLAHKDCNNAKGKKTPHEHAGDLLDSPALAALWQGWRKENADRLKGKGHKARTPREDKDFMDRVGWRFEEDARAKAEENQERRGRRMLHDTARATRLARLYLAAAVMPEDPAEIGAPPVETPPSPEDPTGYTAIYRTISRVQPVNGSVTHMLRQRLLQRDKNRDYQTHHAEDACLLLLAGPAVVQAFNTEAAQHGADAPDDRPVDLMPTSDAYHQQRRARALGRVPLATVDAALADIVMPESDRQDPETGRVHWRLTRAGRGLKRRIDDLTRNCVILSRPRRPSETGTPGALHNATHYGRREITVDGRTDTVVTQRMNARDLVALLDNAKIVPAARLDAAAPGDTILKEICTEIADRHDRVVDPEGTHARRWISARLAALVPAHAEAVARDIAELADLDALADADRTPEQEARRSALRQSPYLGRAISAKKADGRARAREQEILTRALLDPHWGPRGLRHLIMREARAPSLVRIRANKTDAFGRPVPDAAVWVKTDGNAVSQLWRLTSVVTDDGRRIPLPKPIEKRIEISNLEYARLNGLDEGAGVTGNNAPPRPLRQDIDRLTPLWRDHGTAPGGYLGTAVGELEDKARSALRGKAMRQTLTDAGITAEAGWRLDSEGAVCDLEVAKGDTVKKDGKTYKVGVITQGIFGMPVDAAGSAPRTPEDCEKFEEQYGIKPWKAKGIPLA

SEQ ID NO: 343 - protein, 1114 aa, Eubacterium rectale
MNYTEKEKLFMKYILALDIGIASVGWAILDKESETVIEAGSNIFPEASAADNQLRRDMRGAKRNNRRLKTRINDFIKLWENNNLSIPQFKSTEIVGLKVRAITEEITLDELYLILYSYLKHRGISYLEDALDDTVSGSSAYANGLKLNAKELETHYPCEIQQERLNTIGKYRGQSQIINENGEVLDLSNVFTIGAYRKEIQRVFEIQKKYHPELTDEFCDGYMLIFNRKRKYYEGPGNEKSRTDYGRFTTKLDANGNYITEDNIFEKLIGKCSVYPDELRAAAASYTAQEYNVLNDLNNLTINGRKLEENEKHEIVERIKSSNTINMRKIISDCMGENIDDFAGARIDKSGKEIFHKFEVYNKMRKALLEIGIDISNYSREELDEIGYIMTINTDKEAMMEAFQKSWIDLSDDVKQCLINMRKTNGALFNKWQSFSLKIMNELIPEMYAQPKEQMTLLTEMGVTKGTQEEFAGLKYIPVDVVSEDIFNPVVRRSVRISFKILNAVLKKYKALDTIVIEMPRDRNSEEQKKRINDSQKLNEKEMEYIEKKLAVTYGIKLSPSDFSSQKQLSLKLKLWNEQDGICLYSGKTIDPNDIINNPQLFEIDHIIPRSISFDDARSNKVLVYRSENQKKGNQTPYYYLTHSHSEWSFEQYKATVMNLSKKKEYAISRKKIQNLLYSEDITKMDVLKGFINRNINDTSYASRLVLNTIQNFFMANEADTKVKVIKGSYTHQMRCNLKLDKNRDESYSHHAVDAMLIGYSELGYEAYHKLQGEFIDFETGEILRKDMWDENMSDEVYADYLYGKKWANIRNEVVKAEKNVKYWHYVMRKSNRGLCNQTIRGTREYDGKQYKINKLDIRTKEGIKVFAKLAFSKKDSDRERLLVYLNDRRTFDDLCKIYEDYSDAANPFVQYEKETGDIIRKYSKKHNGPRIDKLKYKDGEVGACIDISHKYGFEKGSKKVILESLVPYRMDVYYKEENHSYYLVGVKQSDIKFEKGRNVIDEEAYARILVNEKMIQPGQSRADLENLGFKFKLSFYKNDIIEYEKDGKIYTERLVSRTMPKQRNYIETKPIDKAKFEKQNLVGLGKTKFIKKYRYDILGNKYSCSEEKFTSFC

SEQ ID NO: 344 - protein, 1314 aa, Mycoplasma synoviae
MLRLYCANNLVLNNVQNLWKYLLLLIFDKKIIFLFKIKVILIRRYMENNNKEKIVIGFDLGVASVGWSIVNAETKEVIDLGVRLFSEPEKADYRRAKRTTRRLLRRKKFKREKFHKLILKNAEIFGLQSRNEILNVYKDQSSKYRNILKLKINALKEEIKPSELVWILRDYLQNRGYFYKNEKLTDEFVSNSFPSKKLHEHYEKYGFFRGSVKLDNKLDNKKDKAKEKDEEEESDAKKESEELIFSNKQWINEIVKVFENQSYLTESFKEEYLKLFNYVRPFNKGPGSKNSRTAYGVFSTDIDPETNKFKDYSNIWDKTIGKCSLFEEEIRAPKNLPSALIFNLQNEICTIKNEFTEFKNWWLNAEQKSEILKFVFTELFNWKDKKYSDKKFNKNLQDKIKKYLLNFALENFNLNEEILKNRDLENDTVLGLKGVKYYEKSNATADAALEFSSLKPLYVFIKFLKEKKLDLNYLLGLENTEILYFLDSIYLAISYSSDLKERNEWFKKLLKELYPKIKNNNLEIIENVEDIFEITDQEKFESFSKTHSLSREAFNHIIPLLLSNNEGKNYESLKHSNEELKKRTEKAELKAQQNQKYLKDNFLKEALVPLSVKTSVLQAIKIFNQIIKNFGKKYEISQVVIEMARELTKPNLEKLLNNATNSNIKILKEKLDQTEKFDDFTKKKFIDKIENSVVFRNKLFLWFEQDRKDPYTQLDIKINEIEDETEIDHVIPYSKSADDSWFNKLLVKKSTNQLKKNKTVWEYYQNESDPEAKWNKFVAWAKRIYLVQKSDKESKDNSEKNSIFKNKKPNLKFKNITKKLFDPYKDLGFLARNLNDTRYATKVFRDQLNNYSKHHSKDDENKLFKVVCMNGSITSFLRKSMWRKNEEQVYRFNFWKKDRDQFFHHAVDASIIAIFSLLTKTLYNKLRVYESYDVQRREDGVYLINKETGEVKKADKDYWKDQHNFLKIRENAIEIKNVLNNVDFQNQVRYSRKANTKLNTQLFNETLYGVKEFENNFYKLEKVNLFSRKDLRKFILEDLNEESEKNKKNENGSRKRILTEKYIVDEILQILENEEFKDSKSDINALNKYMDSLPSKFSEFFSQDFINKCKKENSLILTFDAIKHNDPKKVIKIKNLKFFREDATLKNKQAVHKDSKNQIKSFYESYKCVGFIWLKNKNDLEESIFVPINSRVIHFGDKDKDIFDFDSYNKEKLLNEINLKRPENKKFNSINEIEFVKFVKPGALLLNFENQQIYYISTLESSSLRAKIKLLNKMDKGKAVSMKKITNPDEYKIIEHVNPLGINLNWTKKLENNN

SEQ ID NO: 345 - protein, 1197 aa, Porphyromonas sp.
MLMSKHVLGLDLGVGSIGWCLIALDAQGDPAEILGMGSRVVPLNNATKAIEAFNAGAAFTASQERTARRTMRRGFARYQLRRYRLRRELEKVGMLPDAALIQLPLLELWELRERAATAGRRLTLPELGRVLCHINQKRGYRHVKSDAAAIVGDEGEKKKDSNSAYLAGIRANDEKLQAEHKTVGQYFAEQLRQNQSESPTGGISYRIKDQIFSRQCYIDEYDQIMAVQRVHYPDILTDEFIRMLRDEVIFMQRPLKSCKHLVSLCEFEKQERVMRVQQDDGKGGWQLVERRVKFGPKVAPKSSPLFQLCCIYEAVNNIRLTRPNGSPCDITPEERAKIVAHLQSSASLSFAALKKLLKEKALIADQLTSKSGLKGNSTRVALASALQPYPQYHHLLDMELETRMMTVQLTDEETGEVTEREVAVVTDSYVRKPLYRLWHILYSIEEREAMRRALITQLGMKEEDLDGGLLDQLYRLDFVKPGYGNKSAKFICKLLPQLQQGLGYSEACAAVGYRHSNSPTSEEITERTLLEKIPLLQRNELRQPLVEKILNQMINLVNALKAEYGIDEVRVELARELKMSREERERMARNNKDREERNKGVAAKIRECGLYPTKPRIQKYMLWKEAGRQCLYCGRSIEEEQCLREGGMEVEHIIPKSVLYDDSYGNKTCACRRCNKEKGNRTALEYIRAKGREAEYMKRINDLLKEKKISYSKHQRLRWLKEDIPSDFLERQLRLTQYISRQAMAILQQGIRRVSASEGGVTARLRSLWGYGKILHTLNLDRYDSMGETERVSREGEATEELHITNWSKRMDHRHHAIDALVVACTRQSYIQRLNRLSSEFGREDKKKEDQEAQEQQATETGRLSNLERWLTQRPHFSVRTVSDKVAEILISYRPGQRVVTRGRNIYRKKMADGREVSCVQRGVLVPRGELMEASFYGKILSQGRVRIVKRYPLHDLKGEVVDPHLRELITTYNQELKSREKGAPIPPLCLDKDKKQEVRSVRCYAKTLSLDKAIPMCFDEKGEPTAFVKSASNHHLALYRTPKGKLVESIVTFWDAVDRARYGIPLVITHPREVMEQVLQRGDIPEQVLSLLPPSDWVFVDSLQQDEMVVIGLSDEELQRALEAQNYRKISEHLYRVQKMSSSYYVFRYHLETSVADDKNTSGRIPKFHRVQSLKAYEERNIRKVRVDLLGRISLL

SEQ ID NO: 346 - protein, 1121 aa, Streptococcus thermophilus
MSDLVLGLDIGIGSVGVGILNKVTGEIIHKNSRIFPAAQAENNLVRRTNRQGRRLARRKKHRRVRLNRLFEESGLITDFTKISINLNPYQLRVKGLTDELSNEELFIALKNMVKHRGISYLDDASDDGNSSVGDYAQIVKENSKQLETKTPGQIQLERYQTYGQLRGDFTVEKDGKKHRLINVFPTSAYRSEALRILQTQQEFNPQITDEFINRYLEILTGKRKYYHGPGNEKSRTDYGRYRTSGETLDNIFGILIGKCTFYPDEFRAAKASYTAQEFNLLNDLNNLTVPTETKKLSKEQKNQIINYVKNEKAMGPAKLFKYIAKLLSCDVADIKGYRIDKSGKAEIHTFEAYRKMKTLETLDIEQMDRETLDKLAYVLTLNTEREGIQEALEHEFADGSFSQKQVDELVQFRKANSSIFGKGWHNFSVKLMMELIPELYETSEEQMTILTRLGKQKTTSSSNKTKYIDEKLLTEEIYNPVVAKSVRQAIKIVNAAIKEYGDFDNIVIEMARETNEDDEKKAIQKIQKANKDEKDAAMLKAANQYNGKAELPHSVFHGHKQLATKIRLWHQQGERCLYTGKTISIHDLINNSNQFEVDHILPLSITFDDSLANKVLVYATANQEKGQRTPYQALDSMDDAWSFRELKAFVRESKTLSNKKKEYLLTEEDISKFDVRKKFIERNLVDTRYASRVVLNALQEHFRAHKIDTKVSVVRGQFTSQLRRHWGIEKTRDTYHHHAVDALIIAASSQLNLWKKQKNTLVSYSEDQLLDIETGELISDDEYKESVFKAPYQHFVDTLKSKEFEDSILFSYQVDSKFNRKISDATIYATRQAKVGKDKADETYVLGKIKDIYTQDGYDAFMKIYKKDKSKFLMYRHDPQTFEKVIEPILENYPNKQINEKGKEVPCNPFLKYKEEHGYIRKYSKKGNGPEIKSLKYYDSKLGNHIDITPKDSNNKVVLQSVSPWRADVYFNKTTGKYEILGLKYADLQFEKGTGTYKISQEKYNDIKKKEGVDSDSEFKFTLYKNDLLLVKDTETKEQQLFRFLSRTMPKQKHYVELKPYDKQKFEGGEALIKVLGNVANSGQCKKGLGKSNISIYKVRTDVLGNQHIIKNEGDKPKLDF

SEQ ID NO: 347 - protein, 1152 aa, Roseburia inulinivorans
MNAEHGKEGLLIMEENFQYRIGLDIGITSVGWAVLQNNSQDEPVRITDLGVRIFDVAENPKNGDALAAPRRDARTTRRRLRRRRHRLERIKFLLQENGLIEMDSFMERYYKGNLPDVYQLRYEGLDRKLKDEELAQVLIHIAKHRGFRSTRKAETKEKEGGAVLKATTENQKIMQEKGYRTVGEMLYLDEAFHTECLWNEKGYVLTPRNRPDDYKHTILRSMLVEEVHAIFAAQRAHGNQKATEGLEEAYVEIMTSQRSFDMGPGLQPDGKPSPYAMEGFGDRVGKCTFEKDEYRAPKATYTAELFVALQKINHTKLIDEFGTGRFFSEEERKTIIGLLLSSKELKYGTIRKKLNIDPSLKFNSLNYSAKKEGETEEERVLDTEKAKFASMFWTYEYSKCLKDRTEEMPVGEKADLFDRIGEILTAYKNDDSRSSRLKELGLSGEEIDGLLDLSPAKYQRVSLKAMRKMQPYLEDGLIYDKACEAAGYDFRALNDGNKKHLLKGEEINAIVNDITNPVVKRSVSQTIKVINAIIQKYGSPQAVNIELAREMSKNFQDRTNLEKEMKKRQQENERAKQQIIELGKQNPTGQDILKYRLWNDQGGYCLYSGKKIPLEELFDGGYDIDHILPYSITFDDSYRNKVLVTAQENRQKGNRTPYEYFGADEKRWEDYEASVRLLVRDYKKQQKLLKKNFTEEERKEFKERNLNDTKYITRVVYNMIRQNLELEPFNHPEKKKQVWAVNGAVTSYLRKRWGLMQKDRSTDRHHAMDAVVIACCTDGMIHKISRYMQGRELAYSRNFKFPDEETGEILNRDNFTREQWDEKFGVKVPLPWNSFRDELDIRLLNEDPKNFLLTHADVQRELDYPGWMYGEEESPIEEGRYINYIRPLFVSRMPNHKVTGSAHDATIRSARDYETRGVVITKVPLTDLKLNKDNEIEGYYDKDSDRLLYQALVRQLLLHGNDGKKAFAEDFHKPKADGTEGPVVRKVKIEKKQTSGVMVRGGTGIAANGEMVRIDVFRENGKYYFVPVYTADVVRKVLPNRAATHTKPYSEWRVMDDANFVFSLYSRDLIHVKSKKDIKTNLVNGGLLLQKEIFAYYTGADIATASIAGFANDSNFKFRGLGIQSLEIFEKCQVDILGNISVVRHENRQEFH

SEQ ID NO: 348 - protein, 1082 aa, Methylosinus trichosporium
MRVLGLDAGIASLGWALIEIEESNRGELSQGTIIGAGTWMFDAPEEKTQAGAKLKSEQRRTFRGQRRVVRRRRQRMNEVRRILHSHGLLPSSDRDALKQPGLDPWRIRAEALDRLLGPVELAVALGHIARHRGFKSNSKGAKTNDPADDTSKMKRAVNETREKLARFGSAAKMLVEDESFVLRQTPTKNGASEIVRRFRNREGDYSRSLLRDDLAAEMRALFTAQARFQSAIATADLQTAFTKAAFFQRPLQDSEKLVGPCPFEVDEKRAPKRGYSFELFRFLSRLNHVTLRDGKQERTLTRDELALAAADFGAAAKVSFTALRKKLKLPETTVFVGVKADEESKLDVVARSGKAAEGTARLRSVIVDALGELAWGALLCSPEKLDKIAEVISFRSDIGRISEGLAQAGCNAPLVDALTAAASDGRFDPFTGAGHISSKAARNILSGLRQGMTYDKACCAADYDHTASRERGAFDVGGHGREALKRILQEERISRELVGSPTARKALIESIKQVKAIVERYGVPDRIHVELARDVGKSIEEREEITRGIEKRNRQKDKLRGLFEKEVGRPPQDGARGKEELLRFELWSEQMGRCLYTDDYISPSQLVATDDAVQVDHILPWSRFADDSYANKTLCMAKANQDKKGRTPYEWFKAEKTDTEWDAFIVRVEALADMKGFKKRNYKLRNAEEAAAKFRNRNLNDTRWACRLLAEALKQLYPKGEKDKDGKERRRVFSRPGALTDRLRRAWGLQWMKKSTKGDRIPDDRHHALDAIVIAATTESLLQRATREVQEIEDKGLHYDLVKNVTPPWPGFREQAVEAVEKVFVARAERRRARGKAHDATIRHIAVREGEQRVYERRKVAELKLADLDRVKDAERNARLIEKLRNWIEAGSPKDDPPLSPKGDPIFKVRLVTKSKVNIALDTGNPKRPGTVDRGEMARVDVFRKASKKGKYEYYLVPIYPHDIATMKTPPIRAVQAYKPEDEWPEMDSSYEFCWSLVPMTYLQVISSKGEIFEGYYRGMNRSVGAIQLSAHSNSSDVVQGIGARTLTEFKKFNVDRFGRKHEVERELRTWRGETWRGKAYI

SEQ ID NO: 349 - protein, 1156 aa, Ruminococcus albus
MGNYYLGLDVGIGSIGWAVINIEKKRIEDFNVRIFKSGEIQEKNRNSRASQQCRRSRGLRRLYRRKSHRKLRLKNYLSIIGLTTSEKIDYYYETADNNVIQLRNKGLSEKLTPEEIAACLIHICNNRGYKDFYEVNVEDIEDPDERNEYKEEHDSIVLISNLMNEGGYCTPAEMICNCREFDEPNSVYRKFHNSAASKNHYLITRHMLVKEVDLILENQSKYYGILDDKTIAKIKDIIFAQRDFEIGPGKNERFRRFTGYLDSIGKCQFFKDQERGSRFTVIADIYAFVNVLSQYTYTNNRGESVFDTSFANDLINSALKNGSMDKRELKAIAKSYHIDISDKNSDTSLTKCFKYIKVVKPLFEKYGYDWDKLIENYTDTDNNVLNRIGIVLSQAQTPKRRREKLKALNIGLDDGLINELTKLKLSGTANVSYKYMQGSIEAFCEGDLYGKYQAKFNKEIPDIDENAKPQKLPPFKNEDDCEFFKNPVVFRSINETRKLINAIIDKYGYPAAVNIETADELNKTFEDRAIDTKRNNDNQKENDRIVKEIIECIKCDEVHARHLIEKYKLWEAQEGKCLYSGETITKEDMLRDKDKLFEVDHIVPYSLILDNTINNKALVYAEENQKKGQRTPLMYMNEAQAADYRVRVNTMFKSKKCSKKKYQYLMLPDLNDQELLGGWRSRNLNDTRYICKYLVNYLRKNLRFDRSYESSDEDDLKIRDHYRVFPVKSRFTSMFRRWWLNEKTWGRYDKAELKKLTYLDHAADAIIIANCRPEYVVLAGEKLKLNKMYHQAGKRITPEYEQSKKACIDNLYKLFRMDRRTAEKLLSGHGRLTPIIPNLSEEVDKRLWDKNIYEQFWKDDKDKKSCEELYRENVASLYKGDPKFASSLSMPVISLKPDHKYRGTITGEEAIRVKEIDGKLIKLKRKSISEITAESINSIYTDDKILIDSLKTIFEQADYKDVGDYLKKTNQHFFTTSSGKRVNKVTVIEKVPSRWLRKEIDDNNFSLLNDSSYYCIELYKDSKGDNNLQGIAMSDIVHDRKTKKLYLKPDFNYPDDYYTHVMYIFPGDYLRIKSTSKKSGEQLKFEGYFISVKNVNENSFRFISDNKPCAKDKRVSITKKDIVIKLAVDLMGKVQGENNGKGISCGEPLSLLKEKN

SEQ ID NO: 350 - protein, 1187 aa, Bifidobacterium longum
MLSRQLLGASHLARPVSYSYNVQDNDVHCSYGERCFMRGKRYRIGIDVGLNSVGLAAVEVSDENSPVRLLNAQSVIHDGGVDPQKNKEAITRKNMSGVARRTRRMRRRKRERLHKLDMLLGKFGYPVIEPESLDKPFEEWHVRAELATRYIEDDELRRESISIALRHMARHRGWRNPYRQVDSLISDNPYSKQYGELKEKAKAYNDDATAAEEESTPAQLVVAMLDAGYAEAPRLRWRTGSKKPDAEGYLPVRLMQEDNANELKQIFRVQRVPADEWKPLFRSVFYAVSPKGSAEQRVGQDPLAPEQARALKASLAFQEYRIANVITNLRIKDASAELRKLTVDEKQSIYDQLVSPSSEDITWSDLCDFLGFKRSQLKGVGSLTEDGEERISSRPPRLTSVQRIYESDNKIRKPLVAWWKSASDNEHEAMIRLLSNTVDIDKVREDVAYASAIEFIDGLDDDALTKLDSVDLPSGRAAYSVETLQKLTRQMLTTDDDLHEARKTLFNVTDSWRPPADPIGEPLGNPSVDRVLKNVNRYLMNCQQRWGNPVSVNIEHVRSSFSSVAFARKDKREYEKNNEKRSIFRSSLSEQLRADEQMEKVRESDLRRLEAIQRQNGQCLYCGRTITFRTCEMDHIVPRKGVGSTNTRTNFAAVCAECNRMKSNTPFAIWARSEDAQTRGVSLAEAKKRVTMFTFNPKSYAPREVKAFKQAVIARLQQTEDDAAIDNRSIESVAWMADELHRRIDWYFNAKQYVNSASIDDAEAETMKTTVSVFQGRVTASARRAAGIEGKIHFIGQQSKTRLDRRHHAVDASVIAMMNTAAAQTLMERESLRESQRLIGLMPGERSWKEYPYEGTSRYESFHLWLDNMDVLLELLNDALDNDRIAVMQSQRYVLGNSIAHDATIHPLEKVPLGSAMSADLIRRASTPALWCALTRLPDYDEKEGLPEDSHREIRVHDTRYSADDEMGFFASQAAQIAVQEGSADIGSAIHHARVYRCWKTNAKGVRKYFYGMIRVFQTDLLRACHDDLFTVPLPPQSISMRYGEPRVVQALQSGNAQYLGSLVVGDEIEMDFSSLDVDGQIGEYLQFFSQFSGGNLAWKHWVVDGFFNQTQLRIRPRYLAAEGLAKAFSDDVVPDGVQKIVTKQGWLPPVNTASKTAVRIVRRNAFGEPRLSSAHHMPCSWQWRHE

SEQ ID NO: 351 - protein, 1150 aa, Enterococcus faecalis
MYSIGLDLGISSVGWSVIDERTGNVIDLGVRLFSAKNSEKNLERRTNRGGRRLIRRKTNRLKDAKKILAAVGFYEDKSLKNSCPYQLRVKGLTEPLSRGEIYKVTLHILKKRGISYLDEVDTEAAKESQDYKEQVRKNAQLLTKYTPGQIQLQRLKENNRVKTGINAQGNYQLNVFKVSAYANELATILKTQQAFYPNELTDDWIALFVQPGIAEEAGLIYRKRPYYHGPGNEANNSPYGRWSDFQKTGEPATNIFDKLIGKDFQGELRASGLSLSAQQYNLLNDLTNLKIDGEVPLSSEQKEYILTELMTKEFTRFGVNDVVKLLGVKKERLSGWRLDKKGKPEIHTLKGYRNWRKIFAEAGIDLATLPTETIDCLAKVLTLNTEREGIENTLAFELPELSESVKLLVLDRYKELSQSISTQSWHRFSLKTLHLLIPELMNATSEQNTLLEQFQLKSDVRKRYSEYKKLPTKDVLAEIYNPTVNKTVSQAFKVIDALLVKYGKEQIRYITIEMPRDDNEEDEKKRIKELHAKNSQRKNDSQSYFMQKSGWSQEKFQTTIQKNRRFLAKLLYYYEQDGICAYTGLPISPELLVSDSTEIDHIIPISISLDDSINNKVLVLSKANQVKGQQTPYDAWMDGSFKKINGKFSNWDDYQKWVESRHFSHKKENNLLETRNIFDSEQVEKFLARNLNDTRYASRLVLNTLQSFFTNQETKVRVVNGSFTHTLRKKWGADLDKTRETHHHHAVDATLCAVTSFVKVSRYHYAVKEETGEKVMREIDFETGEIVNEMSYWEFKKSKKYERKTYQVKWPNFREQLKPVNLHPRIKFSHQVDRKANRKLSDATIYSVREKTEVKTLKSGKQKITTDEYTIGKIKDIYTLDGWEAFKKKQDKLLMKDLDEKTYERLLSIAETTPDFQEVEEKNGKVKRVKRSPFAVYCEENDIPAIQKYAKKNNGPLIRSLKYYDGKLNKHINITKDSQGRPVEKTKNGRKVTLQSLKPYRYDIYQDLETKAYYTVQLYYSDLRFVEGKYGITEKEYMKKVAEQTKGQVVRFCFSLQKNDGLEIEWKDSQRYDVRFYNFQSANSINFKGLEQEMMPAENQFKQKPYNNGAINLNIAKYGKEGKKLRKFNTDILGKKHYLFYEKEPKNIIK

SEQ ID NO: 352 - protein, 1236 aa, Mycoplasma mobile
MYFYKNKENKLNKKVVLGLDLGIASVGWCLTDISQKEDNKFPIILHGVRLFETVDDSDDKLLNETRRKKRGQRRRNRRLFTRKRDFIKYLIDNNIIELEFDKNPKILVRNFIEKYINPFSKNLELKYKSVTNLPIGFHNLRKAAINEKYKLDKSELIVLLYFYLSLRGAFFDNPEDTKSKEMNKNEIEIFDKNESIKNAEFPIDKIIEFYKISGKIRSTINLKFGHQDYLKEIKQVFEKQNIDFMNYEKFAMEEKSFFSRIRNYSEGPGNEKSFSKYGLYANENGNPELIINEKGQKIYTKIFKTLWESKIGKCSYDKKLYRAPKNSFSAKVFDITNKLTDWKHKNEYISERLKRKILLSRFLNKDSKSAVEKILKEENIKFENLSEIAYNKDDNKINLPIINAYHSLTTIFKKHLINFENYLISNENDLSKLMSFYKQQSEKLFVPNEKGSYEINQNNNVLHIFDAISNILNKFSTIQDRIRILEGYFEFSNLKKDVKSSEIYSEIAKLREFSGTSSLSFGAYYKFIPNLISEGSKNYSTISYEEKALQNQKNNFSHSNLFEKTWVEDLIASPTVKRSLRQTMNLLKEIFKYSEKNNLEIEKIVVEVTRSSNNKHERKKIEGINKYRKEKYEELKKVYDLPNENTTLLKKLWLLRQQQGYDAYSLRKIEANDVINKPWNYDIDHIVPRSISFDDSFSNLVIVNKLDNAKKSNDLSAKQFIEKIYGIEKLKEAKENWGNWYLRNANGKAFNDKGKFIKLYTIDNLDEFDNSDFINRNLSDTSYITNALVNHLTFSNSKYKYSVVSVNGKQTSNLRNQIAFVGIKNNKETEREWKRPEGFKSINSNDFLIREEGKNDVKDDVLIKDRSFNGHHAEDAYFITIISQYFRSFKRIERLNVNYRKETRELDDLEKNNIKFKEKASFDNFLLINALDELNEKLNQMRFSRMVITKKNTQLFNETLYSGKYDKGKNTIKKVEKLNLLDNRTDKIKKIEEFFDEDKLKENELTKLHIFNHDKNLYETLKIIWNEVKIEIKNKNLNEKNYFKYFVNKKLQEGKISFNEWVPILDNDFKIIRKIRYIKFSSEEKETDEIIFSQSNFLKIDQRQNFSFHNTLYWVQIWVYKNQKDQYCFISIDARNSKFEKDEIKINYEKLKTQKEKLQIINEEPILKINKGDLFENEEKELFYIVGRDEKPQKLEIKYILGKKIKDQKQIQKPVKKYFPNWKKVNLTYMGEIFKK

SEQ ID NO: 353 - protein, 1105 aa, Actinomyces coleocanis
MDNKNYRIGIDVGLNSIGFCAVEVDQHDTPLGFLNLSVYRHDAGIDPNGKKTNTTRLAMSGVARRTRRLFRKRKRRLAALDRFIEAQGWTLPDHADYKDPYTPWLVRAELAQTPIRDENDLHEKLAIAVRHIARHRGWRSPWVPVRSLHVEQPPSDQYLALKERVEAKTLLQMPEGATPAEMVVALDLSVDVNLRPKNREKTDTRPENKKPGFLGGKLMQSDNANELRKIAKIQGLDDALLRELIELVFAADSPKGASGELVGYDVLPGQHGKRRAEKAHPAFQRYRIASIVSNLRIRHLGSGADERLDVETQKRVFEYLLNAKPTADITWSDVAEEIGVERNLLMGTATQTADGERASAKPPVDVTNVAFATCKIKPLKEWWLNADYEARCVMVSALSHAEKLTEGTAAEVEVAEFLQNLSDEDNEKLDSFSLPIGRAAYSVDSLERLTKRMIENGEDLFEARVNEFGVSEDWRPPAEPIGARVGNPAVDRVLKAVNRYLMAAEAEWGAPLSVNIEHVREGFISKRQAVEIDRENQKRYQRNQAVRSQIADHINATSGVRGSDVTRYLAIQRQNGECLYCGTAITFVNSEMDHIVPRAGLGSTNTRDNLVATCERCNKSKSNKPFAVWAAECGIPGVSVAEALKRVDFWIADGFASSKEHRELQKGVKDRLKRKVSDPEIDNRSMESVAWMARELAHRVQYYFDEKHTGTKVRVFRGSLTSAARKASGFESRVNFIGGNGKTRLDRRHHAMDAATVAMLRNSVAKTLVLRGNIRASERAIGAAETWKSFRGENVADRQIFESWSENMRVLVEKFNLALYNDEVSIFSSLRLQLGNGKAHDDTITKLQMHKVGDAWSLTEIDRASTPALWCALTRQPDFTWKDGLPANEDRTIIVNGTHYGPLDKVGIFGKAAASLLVRGGSVDIGSAIHHARIYRIAGKKPTYGMVRVFAPDLLRYRNEDLFNVELPPQSVSMRYAEPKVREAIREGKAEYLGWLVVGDELLLDLSSETSGQIAELQQDFPGTTHWTVAGFFSPSRLRLRPVYLAQEGLGEDVSEGSKSIIAGQGWRPAVNKVFGSAMPEVIRRDGLGRKRRFSYSGLPVSWQG

SEQ ID NO: 354 - protein, 1079 aa, Dinoroseobacter shibae
MRLGLDIGTSSIGWWLYETDGAGSDARITGVVDGGVRIFSDGRDPKSGASLAVDRRAARAMRRRRDRYLRRRATLMKVLAETGLMPADPAEAKALEALDPFALRAAGLDEPLPLPHLGRALFHLNQRRGFKSNRKTDRGDNESGKIKDATARLDMEMMANGARTYGEFLHKRRQKATDPRHVPSVRTRLSIANRGGPDGKEEAGYDFYPDRRHLEEEFHKLWAAQGAHHPELTETLRDLLFEKIFFQRPLKEPEVGLCLFSGHHGVPPKDPRLPKAHPLTQRRVLYETVNQLRVTADGREARPLTREERDQVIHALDNKKPTKSLSSMVLKLPALAKVLKLRDGERFTLETGVRDAIACDPLRASPAHPDRFGPRWSILDADAQWEVISRIRRVQSDAEHAALVDWLTEAHGLDRAHAEATAHAPLPDGYGRLGLTATTRILYQLTADVVTYADAVKACGWHHSDGRTGECFDRLPYYGEVLERHVIPGSYHPDDDDITRFGRITNPTVHIGLNQLRRLVNRIIETHGKPHQIVVELARDLKKSEEQKRADIKRIRDTTEAAKKRSEKLEELEIEDNGRNRMLLRLWEDLNPDDAMRRFCPYTGTRISAAMIFDGSCDVDHILPYSRTLDDSFPNRTLCLREANRQKRNQTPWQAWGDTPHWHAIAANLKNLPENKRWRFAPDAMTRFEGENGFLDRALKDTQYLARISRSYLDTLFTKGGHVWVVPGRFTEMLRRHWGLNSLLSDAGRGAVKAKNRTDHRHHAIDAAVIAATDPGLLNRISRAAGQGEAAGQSAELIARDTPPPWEGFRDDLRVRLDRIIVSHRADHGRIDHAARKQGRDSTAGQLHQETAYSIVDDIHVASRTDLLSLKPAQLLDEPGRSGQVRDPQLRKALRVATGGKTGKDFENALRYFASKPGPYQAIRRVRIIKPLQAQARVPVPAQDPIKAYQGGSNHLFEIWRLPDGEIEAQVITSFEAHTLEGEKRPHPAAKRLLRVHKGDMVALERDGRRVVGHVQKMDIANGLFIVPHNEANADTRNNDKSDPFKWIQIGARPAIASGIRRVSVDEIGRLRDGGTRPI

SEQ ID NO: 355 - protein, 1181 aa, Actinomyces sp.
MLHCIAVIRVPPSEEPGFFETHADSCALCHHGCMTYAANDKAIRYRVGIDVGLRSIGFCAVEVDDEDHPIRILNSVVHVHDAGTGGPGETESLRKRSGVAARARRRGRAEKQRLKKLDVLLEELGWGVSSNELLDSHAPWHIRKRLVSEYIEDETERRQCLSVAMAHIARHRGWRNSFSKVDTLLLEQAPSDRMQGLKERVEDRTGLQFSEEVTQGELVATLLEHDGDVTIRGFVRKGGKATKVHGVLEGKYMQSDLVAELRQICRTQRVSETTFEKLVLSIFHSKEPAPSAARQRERVGLDELQLALDPAAKQPRAERAHPAFQKFKVVATLANMRIREQSAGERSLTSEELNRVARYLLNHTESESPTWDDVARKLEVPRHRLRGSSRASLETGGGLTYPPVDDTTVRVMSAEVDWLADWWDCANDESRGHMIDAISNGCGSEPDDVEDEEVNELISSATAEDMLKLELLAKKLPSGRVAYSLKTLREVTAAILETGDDLSQAITRLYGVDPGWVPTPAPIEAPVGNPSVDRVLKQVARWLKFASKRWGVPQTVNIEHTREGLKSASLLEEERERWERFEARREIRQKEMYKRLGISGPFRRSDQVRYEILDLQDCACLYCGNEINFQTFEVDHIIPRVDASSDSRRTNLAAVCHSCNSAKGGLAFGQWVKRGDCPSGVSLENAIKRVRSWSKDRLGLTEKAMGKRKSEVISRLKTEMPYEEFDGRSMESVAWMAIELKKRIEGYFNSDRPEGCAAVQVNAYSGRLTACARRAAHVDKRVRLIRLKGDDGHHKNRFDRRNHAMDALVIALMTPAIARTIAVREDRREAQQLTRAFESWKNFLGSEERMQDRWESWIGDVEYACDRLNELIDADKIPVTENLRLRNSGKLHADQPESLKKARRGSKRPRPQRYVLGDALPADVINRVTDPGLWTALVRAPGFDSQLGLPADLNRGLKLRGKRISADFPIDYFPTDSPALAVQGGYVGLEFHHARLYRIIGPKEKVKYALLRVCAIDLCGIDCDDLFEVELKPSSISMRTADAKLKEAMGNGSAKQIGWLVLGDEIQIDPTKFPKQSIGKFLKECGPVSSWRVSALDTPSKITLKPRLLSNEPLLKTSRVGGHESDLVVAECVEKIMKKTGWVVEINALCQSGLIRVIRRNALGEVRTSPKSGLPISLNLR

SEQ ID NO: 356 - protein, 1113 aa, Alcanivorax sp.
MRYRVGLDLGTASVGAAVFSMDEQGNPMELIWHYERLFSEPLVPDMGQLKPKKAARRLARQQRRQIDRRASRLRRIAIVSRRLGIAPGRNDSGVHGNDVPTLRAMAVNERIELGQLRAVLLRMGKKRGYGGTFKAVRKVGEAGEVASGASRLEEEMVALASVQNKDSVTVGEYLAARVEHGLPSKLKVAANNEYYAPEYALFRQYLGLPAIKGRPDCLPNMYALRHQIEHEFERIWATQSQFHDVMKDHGVKEEIRNAIFFQRPLKSPADKVGRCSLQTNLPRAPRAQIAAQNFRIEKQMADLRWGMGRRAEMLNDHQKAVIRELLNQQKELSFRKIYKELERAGCPGPEGKGLNMDRAALGGRDDLSGNTTLAAWRKLGLEDRWQELDEVTQIQVINFLADLGSPEQLDTDDWSCRFMGKNGRPRNFSDEFVAFMNELRMTDGFDRLSKMGFEGGRSSYSIKALKALTEWMIAPHWRETPETHRVDEEAAIRECYPESLATPAQGGRQSKLEPPPLTGNEVVDVALRQVRHTINMMIDDLGSVPAQIVVEMAREMKGGVTRRNDIEKQNKRFASERKKAAQSIEENGKTPTPARILRYQLWIEQGHQCPYCESNISLEQALSGAYTNFEHILPRTLTQIGRKRSELVLAHRECNDEKGNRTPYQAFGHDDRRWRIVEQRANALPKKSSRKTRLLLLKDFEGEALTDESIDEFADRQLHESSWLAKVTTQWLSSLGSDVYVSRGSLTAELRRRWGLDTVIPQVRFESGMPVVDEEGAEITPEEFEKFRLQWEGHRVTREMRTDRRPDKRIDHRHHLVDAIVTALTSRSLYQQYAKAWKVADEKQRHGRVDVKVELPMPILTIRDIALEAVRSVRISHKPDRYPDGRFFEATAYGIAQRLDERSGEKVDWLVSRKSLTDLAPEKKSIDVDKVRANISRIVGEAIRLHISNIFEKRVSKGMTPQQALREPIEFQGNILRKVRCFYSKADDCVRIEHSSRRGHHYKMLLNDGFAYMEVPCKEGILYGVPNLVRPSEAVGIKRAPESGDFIRFYKGDTVKNIKTGRVYTIKQILGDGGGKLILTPVTETKPADLLSAKWGRLKVGGRNIHLLRLCAE

SEQ ID NO: 357 - protein, 1052 aa, Aminomonas paucivorans
MIGEHVRGGCLFDDHWTPNWGAFRLPNTVRTFTKAENPKDGSSLAEPRRQARGLRRRLRRKTQRLEDLRRLLAKEGVLSLSDLETLFRETPAKDPYQLRAEGLDRPLSFPEWVRVLYHITKHRGFQSNRRNPVEDGQERSRQEEEGKLLSGVGENERLLREGGYRTAGEMLARDPKFQDHRRNRAGDYSHTLSRSLLLEEARRLFQSQRTLGNPHASSNLEEAFLHLVAFQNPFASGEDIRNKAGHCSLEPDQIRAPRRSASAETFMLLQKTGNLRLIHRRTGEERPLTDKEREQIHLLAWKQEKVTHKTLRRHLEIPEEWLFTGLPYHRSGDKAEEKLFVHLAGIHEIRKALDKGPDPAVWDTLRSRRDLLDSIADTLTFYKNEDEILPRLESLGLSPENARALAPLSFSGTAHLSLSALGKLLPHLEEGKSYTQARADAGYAAPPPDRHPKLPPLEEADWRNPVVFRALTQTRKVVNALVRRYGPPWCIHLETARELSQPAKVRRRIETEQQANEKKKQQAEREFLDIVGTAPGPGDLLKMRLWREQGGFCPYCEEYLNPTRLAEPGYAEMDHILPYSRSLDNGWHNRVLVHGKDNRDKGNRTPFEAFGGDTARWDRLVAWVQASHLSAPKKRNLLREDFGEEAERELKDRNLTDTRFITKTAATLLRDRLTFHPEAPKDPVMTLNGRLTAFLRKQWGLHKNRKNGDLHHALDAAVLAVASRSFVYRLSSHNAAWGELPRGREAENGFSLPYPAFRSEVLARLCPTREEILLRLDQGGVGYDEAFRNGLRPVFVSRAPSRRLRGKAHMETLRSPKWKDHPEGPRTASRIPLKDLNLEKLERMVGKDRDRKLYEALRERLAAFGGNGKKAFVAPFRKPCRSGEGPLVRSLRIFDSGYSGVELRDGGEVYAVADHESMVRVDVYAKKNRFYLVPVYVADVARGIVKNRAIVAHKSEEEWDLVDGSFDFRFSLFPGDLVEIEKKDGAYLGYYKSCHRGDGRLLLDRHDRMPRESDCGTFYVSTRKDVLSMSKYQVDPLGEIRLVGSEKPPFVL

SEQ ID NO: 358 - protein, 1233 aa, Mycoplasma canis
MEKKRKVTLGFDLGIASVGWAIVDSETNQVYKLGSRLFDAPDTNLERRTQRGTRRLLRRRKYRNQKFYNLVKRTEVFGLSSREAIENRFRELSIKYPNIIELKTKALSQEVCPDEIAWILHDYLKNRGYFYDEKETKEDFDQQTVESMPSYKLNEFYKKYGYFKGALSQPTESEMKDNKDLKEAFFFDFSNKEWLKEINYFFNVQKNILSETFIEEFKKIFSFTRDISKGPGSDNMPSPYGIFGEFGDNGQGGRYEHIWDKNIGKCSIFTNEQRAPKYLPSALIFNFLNELANIRLYSTDKKNIQPLWKLSSVDKLNILLNLFNLPISEKKKKLTSTNINDIVKKESIKSIMISVEDIDMIKDEWAGKEPNVYGVGLSGLNIEESAKENKFKFQDLKILNVLINLLDNVGIKFEFKDRNDIIKNLELLDNLYLFLIYQKESNNKDSSIDLFIAKNESLNIENLKLKLKEFLLGAGNEFENHNSKTHSLSKKAIDEILPKLLDNNEGWNLEAIKNYDEEIKSQIEDNSSLMAKQDKKYLNDNFLKDAILPPNVKVTFQQAILIFNKIIQKFSKDFEIDKVVIELAREMTQDQENDALKGIAKAQKSKKSLVEERLEANNIDKSVFNDKYEKLIYKIFLWISQDFKDPYTGAQISVNEIVNNKVEIDHIIPYSLCFDDSSANKVLVHKQSNQEKSNSLPYEYIKQGHSGWNWDEFTKYVKRVFVNNVDSILSKKERLKKSENLLTASYDGYDKLGFLARNLNDTRYATILFRDQLNNYAEHHLIDNKKMFKVIAMNGAVTSFIRKNMSYDNKLRLKDRSDFSHHAYDAAIIALFSNKTKTLYNLIDPSLNGIISKRSEGYWVIEDRYTGEIKELKKEDWTSIKNNVQARKIAKEIEEYLIDLDDEVFFSRKTKRKTNRQLYNETIYGIATKTDEDGITNYYKKEKFSILDDKDIYLRLLREREKFVINQSNPEVIDQIIEIIESYGKENNIPSRDEAINIKYTKNKINYNLYLKQYMRSLTKSLDQFSEEFINQMIANKTFVLYNPTKNTTRKIKFLRLVNDVKINDIRKNQVINKFNGKNNEPKAFYENINSLGAIVFKNSANNFKTLSINTQIAIFGDKNWDIEDFKTYNMEKIEKYKEIYGIDKTYNFHSFIFPGTILLDKQNKEFYYISSIQTVRDIIEIKFLNKIEFKDENKNQDTSKTPKRLMFGIKSIMNNYEQVDISPFGINKKIFE

SEQ ID NO: 359 - protein, 1119 aa, Lactobacillus coryniformis
MGYRIGLDVGITSTGYAVLKTDKNGLPYKILTLDSVIYPRAENPQTGASLAEPRRIKRGLRRRTRRTKFRKQRTQQLFIHSGLLSKPEIEQILATPQAKYSVYELRVAGLDRRLTNSELFRVLYFFIGHRGFKSNRKAELNPENEADKKQMGQLLNSIEEIRKAIAEKGYRTVGELYLKDPKYNDHKRNKGYIDGYLSTPNRQMLVDEIKQILDKQRELGNEKLTDEFYATYLLGDENRAGIFQAQRDFDEGPGAGPYAGDQIKKMVGKDIFEPTEDRAAKATYTFQYFNLLQKMTSLNYQNTTGDTWHTLNGLDRQAIIDAVFAKAEKPTKTYKPTDFGELRKLLKLPDDARFNLVNYGSLQTQKEIETVEKKTRFVDFKAYHDLVKVLPEEMWQSRQLLDHIGTALTLYSSDKRRRRYFAEELNLPAELIEKLLPLNFSKFGHLSIKSMQNIIPYLEMGQVYSEATTNTGYDFRKKQISKDTIREEITNPVVRRAVTKTIKIVEQIIRRYGKPDGINIELARELGRNFKERGDIQKRQDKNRQTNDKIAAELTELGIPVNGQNIIRYKLHKEQNGVDPYTGDQIPFERAFSEGYEVDHIIPYSISWDDSYTNKVLTSAKCNREKGNRIPMVYLANNEQRLNALTNIADNIIRNSRKRQKLLKQKLSDEELKDWKQRNINDTRFITRVLYNYFRQAIEFNPELEKKQRVLPLNGEVTSKIRSRWGFLKVREDGDLHHAIDATVIAAITPKFIQQVTKYSQHQEVKNNQALWHDAEIKDAEYAAEAQRMDADLFNKIFNGFPLPWPEFLDELLARISDNPVEMMKSRSWNTYTPIEIAKLKPVFVVRLANHKISGPAHLDTIRSAKLFDEKGIVLSRVSITKLKINKKGQVATGDGIYDPENSNNGDKVVYSAIRQALEAHNGSGELAFPDGYLEYVDHGTKKLVRKVRVAKKVSLPVRLKNKAAADNGSMVRIDVFNTGKKFVFVPIYIKDTVEQVLPNKAIARGKSLWYQITESDQFCFSLYPGDMVHIESKTGIKPKYSNKENNTSVVPIKNFYGYFDGADIATASILVRAHDSSYTARSIGIAGLLKFEKYQVDYFGRYHKVHEKKRQLFVKRDE

SEQ ID NO: 360 - protein, 1195 aa, Elusimicrobium minutum
MQKNINTKQNHIYIKQAQKIKEKLGDKPYRIGLDLGVGSIGFAIVSMEENDGNVLLPKEIIMVGSRIFKASAGAADRKLSRGQRNNHRHTRERMRYLWKVLAEQKLALPVPADLDRKENSSEGETSAKRFLGDVLQKDIYELRVKSLDERLSLQELGYVLYHIAGHRGSSAIRTFENDSEEAQKENTENKKIAGNIKRLMAKKNYRTYGEYLYKEFFENKEKHKREKISNAANNHKFSPTRDLVIKEAEAILKKQAGKDGFHKELTEEYIEKLTKAIGYESEKLIPESGFCPYLKDEKRLPASHKLNEERRLWETLNNARYSDPIVDIVTGEITGYYEKQFTKEQKQKLFDYLLTGSELTPAQTKKLLGLKNTNFEDIILQGRDKKAQKIKGYKLIKLESMPFWARLSEAQQDSFLYDWNSCPDEKLLTEKLSNEYHLTEEEIDNAFNEIVLSSSYAPLGKSAMLIILEKIKNDLSYTEAVEEALKEGKLTKEKQAIKDRLPYYGAVLQESTQKIIAKGFSPQFKDKGYKTPHTNKYELEYGRIANPVVHQTLNELRKLVNEIIDILGKKPCEIGLETARELKKSAEDRSKLSREQNDNESNRNRIYEIYIRPQQQVIITRRENPRNYILKFELLEEQKSQCPFCGGQISPNDIINNQADIEHLFPIAESEDNGRNNLVISHSACNADKAKRSPWAAFASAAKDSKYDYNRILSNVKENIPHKAWRFNQGAFEKFIENKPMAARFKTDNSYISKVAHKYLACLFEKPNIICVKGSLTAQLRMAWGLQGLMIPFAKQLITEKESESFNKDVNSNKKIRLDNRHHALDAIVIAYASRGYGNLLNKMAGKDYKINYSERNWLSKILLPPNNIVWENIDADLESFESSVKTALKNAFISVKHDHSDNGELVKGTMYKIFYSERGYTLTTYKKLSALKLTDPQKKKTPKDFLETALLKFKGRESEMKNEKIKSAIENNKRLFDVIQDNLEKAKKLLEEENEKSKAEGKKEKNINDASIYQKAISLSGDKYVQLSKKEPGKFFAISKPTPTTTGYGYDTGDSLCVDLYYDNKGKLCGEIIRKIDAQQKNPLKYKEQGFTLFERIYGGDILEVDFDIHSDKNSFRNNTGSAPENRVFIKVGTFTEITNNNIQIWFGNIIKSTGGQDDSFTINSMQQYNPRKLILSSCGFIKYRSPILKNKEG

SEQ ID NO: 361 - protein, 1082 aa, Neisseria meningitidis; identical to SEQ ID NO: 25

SEQ ID NO: 362 - protein, 1056 aa, Pasteurella multocida
MQTTNLSYILGLDLGIASVGWAVVEINENEDPIGLIDVGVRIFERAEVPKTGESLALSRRLARSTRRLIRRRAHRLLLAKRFLKREGILSTIDLEKGLPNQAWELRVAGLERRLSAIEWGAVLLHLIKHRGYLSKRKNESQTNNKELGALLSGVAQNHQLLQSDDYRTPAELALKKFAKEEGHIRNQRGAYTHTFNRLDLLAELNLLFAQQHQFGNPHCKEHIQQYMTELLMWQKPALSGEAILKMLGKCTHEKNEFKAAKHTYSAERFVWLTKLNNLRILEDGAERALNEEERQLLINHPYEKSKLTYAQVRKLLGLSEQAIFKHLRYSKENAESATFMELKAWHAIRKALENQGLKDTWQDLAKKPDLLDEIGTAFSLYKTDEDIQQYLTNKVPNSVINALLVSLNFDKFIELSLKSLRKILPLMEQGKRYDQACREIYGHHYGEANQKTSQLLPAIPAQEIRNPVVLRTLSQARKVINAIIRQYGSPARVHIETGRELGKSFKERREIQKQQEDNRTKRESAVQKFKELFSDFSSEPKSKDILKFRLYEQQHGKCLYSGKEINIHRLNEKGYVEIDHALPFSRTWDDSFNNKVLVLASENQNKGNQTPYEWLQGKINSERWKNFVALVLGSQCSAAKKQRLLTQVIDDNKFIDRNLNDTRYIARFLSNYIQENLLLVGKNKKNVFTPNGQITALLRSRWGLIKARENNNRHHALDAIVVACATPSMQQKITRFIRFKEVHPYKIENRYEMVDQESGEIISPHFPEPWAYFRQEVNIRVFDNHPDTVLKEMLPDRPQANHQFVQPLFVSRAPTRKMSGQGHMETIKSAKRLAEGISVLRIPLTQLKPNLLENMVNKEREPALYAGLKARLAEFNQDPAKAFATPFYKQGGQQVKAIRVEQVQKSGVLVRENNGVADNASIVRTDVFIKNNKFFLVPIYTWQVAKGILPNKAIVAHKNEDEWEEMDEGAKFKFSLFPNDLVELKTKKEYFFGYYIGLDRATGNISLKEHDGEISKGKDGVYRVGVKLALSFEKYQVDELGKNRQICRPQQRQPVR

SEQ ID NO: 363 - protein, 1059 aa, Rhodovulum sp.
MGIRFAFDLGTNSIGWAVWRTGPGVFGEDTAASLDGSGVLIFKDGRNPKDGQSLATMRRVPRQSRKRRDRFVLRRRDLLAALRKAGLFPVDVEEGRRLAATDPYHLRAKALDESLTPHEMGRVIFHLNQRRGFRSNRKADRQDREKGKIAEGSKRLAETLAATNCRTLGEFLWSRHRGTPRTRSPTRIRMEGEGAKALYAFYPTREMVRAEFERLWTAQSRFAPDLLTPERHEEIAGILFRQRDLAPPKIGCCTFEPSERRLPRALPSVEARGIYERLAHLRITTGPVSDRGLTRPERDVLASALLAGKSLTFKAVRKTLKILPHALVNFEEAGEKGLDGALTAKLLSKPDHYGAAWHGLSFAEKDTFVGKLLDEADEERLIRRLVTENRLSEDAARRCASIPLADGYGRLGRTANTEILAALVEETDETGTVVTYAEAVRRAGERTGRNWHHSDERDGVILDRLPYYGEILQRHVVPGSGEPEEKNEAARWGRLANPTVHIGLNQLRKVVNRLIAAHGRPDQIVVELARELKLNREQKERLDRENRKNREENERRTAILAEHGQRDTAENKIRLRLFEEQARANAGIALCPYTGRAIGIAELFTSEVEIDHILPVSLTLDDSLANRVLCRREANREKRRQTPFQAFGATPAWNDIVARAAKLPPNKRWRFDPAALERFEREGGFLGRQLNETKYLSRLAKIYLGKICDPDRVYVTPGTLTGLLRARWGLNSILSDSNFKNRSDHRHHAVDAVVIGVLTRGMIQRIAHDAARAEDQDLDRVFRDVPVPFEDFRDHVRERVSTITVAVKPEHGKGGALHEDTSYGLVPDTDPNAALGNLVVRKPIRSLTAGEVDRVRDRALRARLGALAAPFRDESGRVRDAKGLAQALEAFGAENGIRRVRILKPDASVVTIADRRTGVPYRAVAPGENHHVDIVQMRDGSWRGFAASVFEVNRPGWRPEWEVKKLGGKLVMRLHKGDMVELSDKDGQRRVKVVQQIEISANRVRLSPHNDGGKLQDRHADADDPFRWDLATIPLLKDRGCVAVRVDPIGVVTLRRSNV

SEQ ID NO: 364 - protein, 1096 aa, Eubacterium dolichum
MMEVFMGRLVLGLDIGITSVGFGIIDLDESEIVDYGVRLFKEGTAAENETRRTKRGGRRLKRRRVTRREDMLHLLKQAGIISTSFHPLNNPYDVRVKGLNERLNGEELATALLHLCKHRGSSVETIEDDEAKAKEAGETKKVLSMNDQLLKSGKYVCEIQKERLRTNGHIRGHENNFKTRAYVDEAFQILSHQDLSNELKSAIITIISRKRMYYDGPGGPLSPTPYGRYTYFGQKEPIDLIEKMRGKCSLFPNEPRAPKLAYSAELFNLLNDLNNLSIEGEKLTSEQKAMILKIVHEKGKITPKQLAKEVGVSLEQIRGFRIDTKGSPLLSELTGYKMIREVLEKSNDEHLEDHVFYDEIAEILTKTKDIEGRKKQISELSSDLNEESVHQLAGLTKFTAYHSLSFKALRLINEEMLKTELNQMQSITLFGLKQNNELSVKGMKNIQADDTAILSPVAKRAQRETFKVVNRLREIYGEFDSIVVEMAREKNSEEQRKAIRERQKFFEMRNKQVADIIGDDRKINAKLREKLVLYQEQDGKTAYSLEPIDLKLLIDDPNAYEVDHIIPISISLDDSITNKVLVTHRENQEKGNLTPISAFVKGRFTKGSLAQYKAYCLKLKEKNIKTNKGYRKKVEQYLLNENDIYKYDIQKEFINRNLVDTSYASRVVLNTLTTYFKQNEIPTKVFTVKGSLTNAFRRKINLKKDRDEDYGHHAIDALIIASMPKMRLLSTIFSRYKIEDIYDESTGEVFSSGDDSMYYDDRYFAFIASLKAIKVRKFSHKIDTKPNRSVADETIYSTRVIDGKEKVVKKYKDIYDPKFTALAEDILNNAYQEKYLMALHDPQTFDQIVKVVNYYFEEMSKSEKYFTKDKKGRIKISGMNPLSLYRDEHGMLKKYSKKGDGPAITQMKYFDGVLGNHIDISAHYQVRDKKVVLQQISPYRTDFYYSKENGYKFVTIRYKDVRWSEKKKKYVIDQQDYAMKKAEKKIDDTYEFQFSMHRDELIGITKAEGEALIYPDETWHNFNFFFHAGETPEILKFTATNNDKSNKIEVKPIHCYCKMRLMPTISKKIVRIDKYATDVVGNLYKVKKNTLKFEFD

SEQ ID NO: 365 - protein, 1132 aa, Nitratifractor salsuginis
MKKILGVDLGITSFGYAILQETGKDLYRCLDNSVVMRNNPYDEKSGESSQSIRSTQKSMRRLIEKRKKRIRCVAQTMERYGILDYSETMKINDPKNNPIKNRWQLRAVDAWKRPLSPQELFAIFAHMAKHRGYKSIATEDLIYELELELGLNDPEKESEKKADERRQVYNALRHLEELRKKYGGETIAQTIHRAVEAGDLRSYRNHDDYEKMIRREDIEEEIEKVLLRQAELGALGLPEEQVSELIDELKACITDQEMPTIDESLFGKCTFYKDELAAPAYSYLYDLYRLYKKLADLNIDGYEVTQEDREKVIEWVEKKIAQGKNLKKITHKDLRKILGLAPEQKIFGVEDERIVKGKKEPRTFVPFFFLADIAKFKELFASIQKHPDALQIFRELAEILQRSKTPQEALDRLRALMAGKGIDTDDRELLELFKNKRSGTRELSHRYILEALPLFLEGYDEKEVQRILGFDDREDYSRYPKSLRHLHLREGNLFEKEENPINNHAVKSLASWALGLIADLSWRYGPFDEIILETTRDALPEKIRKEIDKAMREREKALDKIIGKYKKEFPSIDKRLARKIQLWERQKGLDLYSGKVINLSQLLDGSADIEHIVPQSLGGLSTDYNTIVTLKSVNAAKGNRLPGDWLAGNPDYRERIGMLSEKGLIDWKKRKNLLAQSLDEIYTENTHSKGIRATSYLEALVAQVLKRYYPFPDPELRKNGIGVRMIPGKVTSKTRSLLGIKSKSRETNFHHAEDALILSTLTRGWQNRLHRMLRDNYGKSEAELKELWKKYMPHIEGLTLADYIDEAFRRFMSKGEESLFYRDMFDTIRSISYWVDKKPLSASSHKETVYSSRHEVPTLRKNILEAFDSLNVIKDRHKLTTEEFMKRYDKEIRQKLWLHRIGNTNDESYRAVEERATQIAQILTRYQLMDAQNDKEIDEKFQQALKELITSPIEVTGKLLRKMRFVYDKLNAMQIDRGLVETDKNMLGIHISKGPNEKLIFRRMDVNNAHELQKERSGILCYLNEMLFIFNKKGLIHYGCLRSYLEKGQGSKYIALFNPRFPANPKAQPSKFTSDSKIKQVGIGSATGIIKAHLDLDGHVRSYEVFGTLPEGSIEWFKEESGYGRVEDDPHH

SEQ ID NO: 366 - protein, 1173 aa, Rhodospirillum rubrum
MRPIEPWILGLDIGTDSLGWAVFSCEEKGPPTAKELLGGGVRLFDSGRDAKDHTSRQAERGAFRRARRQTRTWPWRRDRLIALFQAAGLTPPAAETRQIALALRREAVSRPLAPDALWAALLHLAHHRGFRSNRIDKRERAAAKALAKAKPAKATAKATAPAKEADDEAGFWEGAEAALRQRMAASGAPTVGALLADDLDRGQPVRMRYNQSDRDGVVAPTRALIAEELAEIVARQSSAYPGLDWPAVTRLVLDQRPLRSKGAGPCAFLPGEDRALRALPTVQDFIIRQTLANLRLPSTSADEPRPLTDEEHAKALALLSTARFVEWPALRRALGLKRGVKFTAETERNGAKQAARGTAGNLTEAILAPLIPGWSGWDLDRKDRVFSDLWAARQDRSALLALIGDPRGPTRVTEDETAEAVADAIQIVLPTGRASLSAKAARAIAQAMAPGIGYDEAVTLALGLHHSHRPRQERLARLPYYAAALPDVGLDGDPVGPPPAEDDGAAAEAYYGRIGNISVHIALNETRKIVNALLHRHGPILRLVMVETTRELKAGADERKRMIAEQAERERENAEIDVELRKSDRWMANARERRQRVRLARRQNNLCPYTSTPIGHADLLGDAYDIDHVIPLARGGRDSLDNMVLCQSDANKTKGDKTPWEAFHDKPGWIAQRDDFLARLDPQTAKALAWRFADDAGERVARKSAEDEDQGFLPRQLTDTGYIARVALRYLSLVTNEPNAVVATNGRLTGLLRLAWDITPGPAPRDLLPTPRDALRDDTAARRFLDGLTPPPLAKAVEGAVQARLAALGRSRVADAGLADALGLTLASLGGGGKNRADHRHHFIDAAMIAVTTRGLINQINQASGAGRILDLRKWPRTNFEPPYPTFRAEVMKQWDHIHPSIRPAHRDGGSLHAATVFGVRNRPDARVLVQRKPVEKLFLDANAKPLPADKIAEIIDGFASPRMAKRFKALLARYQAAHPEVPPALAALAVARDPAFGPRGMTANTVIAGRSDGDGEDAGLITPFRANPKAAVRTMGNAVYEVWEIQVKGRPRWTHRVLTRFDRTQPAPPPPPENARLVMRLRRGDLVYWPLESGDRLFLVKKMAVDGRLALWPARLATGKATALYAQLSCPNINLNGDQGYCVQSAEGIRKEKIRTTSCTALGRLRLSKKAT

SEQ ID NO: 367 - protein, 1021 aa, Clostridium cellulolyticum
MKYTLGLDVGIASVGWAVIDKDNNKIIDLGVRCFDKAEESKTGESLATARRIARGMRRRISRRSQRLRLVKKLFVQYEIIKDSSEFNRIFDTSRDGWKDPWELRYNALSRILKPYELVQVLTHITKRRGFKSNRKEDLSTTKEGVVITSIKNNSEMLRTKNYRTIGEMIFMETPENSNKRNKVDEYIHTIAREDLLNEIKYIFSIQRKLGSPFVTEKLEHDFLNIWEFQRPFASGDSILSKVGKCTLLKEELRAPTSCYTSEYFGLLQSINNLVLVEDNNTLTLNNDQRAKIIEYAHFKNEIKYSEIRKLLDIEPEILFKAHNLTHKNPSGNNESKKFYEMKSYHKLKSTLPTDIWGKLHSNKESLDNLFYCLTVYKNDNEIKDYLQANNLDYLIEYIAKLPTFNKFKHLSLVAMKRIIPFMEKGYKYSDACNMAELDFTGSSKLEKCNKLTVEPIIENVTNPVVIRALTQARKVINAIIQKYGLPYMVNIELAREAGMTRQDRDNLKKEHENNRKAREKISDLIRQNGRVASGLDILKWRLWEDQGGRCAYSGKPIPVCDLLNDSLTQIDHIYPYSRSMDDSYMNKVLVLTDENQNKRSYTPYEVWGSTEKWEDFEARIYSMHLPQSKEKRLLNRNFITKDLDSFISRNLNDTRYISRFLKNYIESYLQFSNDSPKSCVVCVNGQCTAQLRSRWGLNKNREESDLHHALDAAVIACADRKIIKEITNYYNERENHNYKVKYPLPWHSFRQDLMETLAGVFISRAPRRKITGPAHDETIRSPKHFNKGLTSVKIPLTTVTLEKLETMVKNTKGGISDKAVYNVLKNRLIEHNNKPLKAFAEKIYKPLKNGTNGAIIRSIRVETPSYTGVFRNEGKGISDNSLMVRVDVFKKKDKYYLVPIYVAHMIKKELPSKAIVPLKPESQWELIDSTHEFLFSLYQNDYLVIKTKKGITEGYYRSCHRGTGSLSLMPHFANNKNVKIDIGVRTAISIEKYNVDILGNKSIVKGEPRRGMEKYNSFKSN

SEQ ID NO: 368 - protein, 1024 aa, Helicobacter mustelae
MIRTLGIDIGIASIGWAVIEGEYTDKGLENKEIVASGVRVFTKAENPKNKESLALPRTLARSARRRNARKKGRIQQVKHYLSKALGLDLECFVQGEKLATLFQTSKDFLSPWELRERALYRVLDKEELARVILHIAKRRGYDDITYGVEDNDSGKIKKAIAENSKRIKEEQCKTIGEMMYKLYFQKSLNVRNKKESYNRCVGRSELREELKTIFQIQQELKSPWVNEELIYKLLGNPDAQSKQEREGLIFYQRPLKGFGDKIGKCSHIKKGENSPYRACKHAPSAEEFVALTKSINFLKNLTNRHGLCFSQEDMCVYLGKILQEAQKNEKGLTYSKLKLLLDLPSDFEFLGLDYSGKNPEKAVFLSLPSTFKLNKITQDRKTQDKIANILGANKDWEAILKELESLQLSKEQIQTIKDAKLNFSKHINLSLEALYHLLPLMREGKRYDEGVEILQERGIFSKPQPKNRQLLPPLSELAKEESYFDIPNPVLRRALSEFRKVVNALLEKYGGFHYFHIELTRDVCKAKSARMQLEKINKKNKSENDAASQLLEVLGLPNTYNNRLKCKLWKQQEEYCLYSGEKITIDHLKDQRALQIDHAFPLSRSLDDSQSNKVLCLTSSNQEKSNKTPYEWLGSDEKKWDMYVGRVYSSNFSPSKKRKLTQKNFKERNEEDFLARNLVDTGYIGRVTKEYIKHSLSFLPLPDGKKEHIRIISGSMTSTMRSFWGVQEKNRDHHLHHAQDAIIIACIEPSMIQKYTTYLKDKETHRLKSHQKAQILREGDHKLSLRWPMSNFKDKIQESIQNIIPSHHVSHKVTGELHQETVRTKEFYYQAFGGEEGVKKALKFGKIREINQGIVDNGAMVRVDIFKSKDKGKFYAVPIYTYDFAIGKLPNKAIVQGKKNGIIKDWLEMDENYEFCFSLFKNDCIKIQTKEMQEAVLAIYKSTNSAKATIELEHLSKYALKNEDEEKMFTDTDKEKNKTMTRESCGIQGLKVFQKVKLSVLGEVLEHKPRNRQNIALKTTPKHV

SEQ ID NO: 369 - protein, 1092 aa, Ilyobacter polytropus
MKYSIGLDIGIASVGWSVINKDKERIEDMGVRIFQKAENPKDGSSLASSRREKRGSRRRNRRKKHRLDRIKNILCESGLVKKNEIEKIYKNAYLKSPWELRAKSLEAKISNKEIAQILLHIAKRRGFKSFRKTDRNADDTGKLLSGIQENKKIMEEKGYLTIGDMVAKDPKFNTHVRNKAGSYLFSFSRKLLEDEVRKIQAKQKELGNTHFTDDVLEKYIEVFNSQRNFDEGPSKPSPYYSEIGQIAKMIGNCTFESSEKRTAKNTWSGERFVFLQKLNNFRIVGLSGKRPLTEEERDIVEKEVYLKKEVRYEKLRKILYLKEEERFGDLNYSKDEKQDKKTEKTKFISLIGNYTIKKLNLSEKLKSEIEEDKSKLDKIIEILTFNKSDKTIESNLKKLELSREDIEILLSEEFSGTLNLSLKAIKKILPYLEKGLSYNEACEKADYDYKNNGIKFKRGELLPVVDKDLIANPVVLRAISQTRKVVNAIIRKYGTPHTIHVEVARDLAKSYDDRQTIIKENKKRELENEKTKKFISEEFGIKNVKGKLLLKYRLYQEQEGRCAYSRKELSLSEVILDESMTDIDHIIPYSRSMDDSYSNKVLVLSGENRKKSNLLPKEYFDRQGRDWDTFVLNVKAMKIHPRKKSNLLKEKFTREDNKDWKSRALNDTRYISRFVANYLENALEYRDDSPKKRVFMIPGQLTAQLRARWRLNKVRENGDLHHALDAAVVAVTDQKAINNISNISRYKELKNCKDVIPSIEYHADEETGEVYFEEVKDTRFPMPWSGFDLELQKRLESENPREEFYNLLSDKRYLGWFNYEEGFIEKLRPVFVSRMPNRGVKGQAHQETIRSSKKISNQIAVSKKPLNSIKLKDLEKMQGRDTDRKLYEALKNRLEEYDDKPEKAFAEPFYKPTNSGKRGPLVRGIKVEEKQNVGVYVNGGQASNGSMVRIDVFRKNGKFYTVPIYVHQTLLKELPNRAINGKPYKDWDLIDGSFEFLYSFYPNDLIEIEFGKSKSIKNDNKLTKTEIPEVNLSEVLGYYRGMDTSTGAATIDTQDGKIQMRIGIKTVKNIKKYQVDVLGNVYKVKREKRQTF

SEQ ID NO: 370 - protein, 1179 aa, Sphaerochaeta globus
MSKKVSRRYEEQAQEICQRLGSRPYSIGLDLGVGSIGVAVAAYDPIKKQPSDLVFVSSRIFIPSTGAAERRQKRGQRNSLRHRANRLKFLWKLLAERNLMLSYSEQDVPDPARLRFEDAVVRANPYELRLKGLNEQLTLSELGYALYHIANHRGSSSVRTFLDEEKSSDDKKLEEQQAMTEQLAKEKGISTFIEVLTAFNTNGLIGYRNSESVKSKGVPVPTRDIISNEIDVLLQTQKQFYQEILSDEYCDRIVSAILFENEKIVPEAGCCPYFPDEKKLPRCHFLNEERRLWEAINNARIKMPMQEGAAKRYQSASFSDEQRHILFHIARSGTDITPKLVQKEFPALKTSIIVLQGKEKAIQKIAGFRFRRLEEKSFWKRLSEEQKDDFFSAWTNTPDDKRLSKYLMKHLLLTENEVVDALKTVSLIGDYGPIGKTATQLLMKHLEDGLTYTEALERGMETGEFQELSVWEQQSLLPYYGQILTGSTQALMGKYWHSAFKEKRDSEGFFKPNTNSDEEKYGRIANPVVHQTLNELRKLMNELITILGAKPQEITVELARELKVGAEKREDIIKQQTKQEKEAVLAYSKYCEPNNLDKRYIERFRLLEDQAFVCPYCLEHISVADIAAGRADVDHIFPRDDTADNSYGNKVVAHRQCNDIKGKRTPYAAFSNTSAWGPIMHYLDETPGMWRKRRKFETNEEEYAKYLQSKGFVSRFESDNSYIAKAAKEYLRCLFNPNNVTAVGSLKGMETSILRKAWNLQGIDDLLGSRHWSKDADTSPTMRKNRDDNRHHGLDAIVALYCSRSLVQMINTMSEQGKRAVEIEAMIPIPGYASEPNLSFEAQRELFRKKILEFMDLHAFVSMKTDNDANGALLKDTVYSILGADTQGEDLVFVVKKKIKDIGVKIGDYEEVASAIRGRITDKQPKWYPMEMKDKIEQLQSKNEAALQKYKESLVQAAAVLEESNRKLIESGKKPIQLSEKTISKKALELVGGYYYLISNNKRTKTFVVKEPSNEVKGFAFDTGSNLCLDFYHDAQGKLCGEIIRKIQAMNPSYKPAYMKQGYSLYVRLYQGDVCELRASDLTEAESNLAKTTHVRLPNAKPGRTFVIIITFTEMGSGYQIYFSNLAKSKKGQDTSFTLTTIKNYDVRKVQLSSAGLVRYVSPLLVDKIEKDEVALCGE

SEQ ID NO: 371 - protein, 1054 aa, Staphylococcus lugdunensis
MNQKFILGLDIGITSVGYGLIDYETKNIIDAGVRLFPEANVENNEGRRSKRGSRRLKRRRIHRLERVKKLLEDYNLLDQSQIPQSTNPYAIRVKGLSEALSKDELVIALLHIAKRRGIHKIDVIDSNDDVGNELSTKEQLNKNSKLLKDKFVCQIQLERMNEGQVRGEKNRFKTADIIKEIIQLLNVQKNFHQLDENFINKYIELVEMRREYFEGPGKGSPYGWEGDPKAWYETLMGHCTYFPDELRSVKYAYSADLFNALNDLNNLVIQRDGLSKLEYHEKYHIIENVFKQKKKPTLKQIANEINVNPEDIKGYRITKSGKPQFTEFKLYHDLKSVLFDQSILENEDVLDQIAEILTIYQDKDSIKSKLTELDILLNEEDKENIAQLTGYTGTHRLSLKCIRLVLEEQWYSSRNQMEIFTHLNIKPKKINLTAANKIPKAMIDEFILSPVVKRTFGQAINLINKIIEKYGVPEDIIIELARENNSKDKQKFINEMQKKNENTRKRINEIIGKYGNQNAKRLVEKIRLHDEQEGKCLYSLESIPLEDLLNNPNHYEVDHIIPRSVSFDNSYHNKVLVKQSENSKKSNLTPYQYFNSGKSKLSYNQFKQHILNLSKSQDRISKKKKEYLLEERDINKFEVQKEFINRNLVDTRYATRELTNYLKAYFSANNMNVKVKTINGSFTDYLRKVWKFKKERNHGYKHHAEDALIIANADFLFKENKKLKAVNSVLEKPEIESKQLDIQVDSEDNYSEMFIIPKQVQDIKDFRNFKYSHRVDKKPNRQLINDTLYSTRKKDNSTYIVQTIKDIYAKDNTTLKKQFDKSPEKFLMYQHDPRTFEKLEVIMKQYANEKNPLAKYHEETGEYLTKYSKKNNGPIVKSLKYIGNKLGSHLDVTHQFKSSTKKLVKLSIKPYRFDVYLTDKGYKFITISYLDVLKKDNYYYIPEQKYDKLKLGKAIDKNAKFIASFYKNDLIKLDGEIYKIIGVNSDTRNMIELDLPDIRYKEYCELNNIKGEPRIKKTIGKKVNSIEKLTTDVLGNVFTNTQYTKPQLLFKRGN

SEQ ID NO: 372 - protein, 1061 aa, Treponema sp.
MIMKLEKWRLGLDLGTNSIGWSVFSLDKDNSVQDLIDMGVRIFSDGRDPKTKEPLAVARRTARSQRKLIYRRKLRRKQVFKFLQEQGLFPKTKEECMTLKSLNPYELRIKALDEKLEPYELGRALFNLAVRRGFKSNRKDGSREEVSEKKSPDEIKTQADMQTHLEKAIKENGCRTITEFLYKNQGENGGIRFAPGRMTYYPTRKMYEEEFNLIRSKQEKYYPQVDWDDIYKAIFYQRPLKPQQRGYCIYENDKERTFKAMPCSQKLRILQDIGNLAYYEGGSKKRVELNDNQDKVLYELLNSKDKVTFDQMRKALCLADSNSFNLEENRDFLIGNPTAVKMRSKNRFGKLWDEIPLEEQDLIIETIITADEDDAVYEVIKKYDLTQEQRDFIVKNTILQSGTSMLCKEVSEKLVKRLEEIADLKYHEAVESLGYKFADQTVEKYDLLPYYGKVLPGSTMEIDLSAPETNPEKHYGKISNPTVHVALNQTRVVVNALIKEYGKPSQIAIELSRDLKNNVEKKAEIARKQNQRAKENIAINDTISALYHTAFPGKSFYPNRNDRMKYRLWSELGLGNKCIYCGKGISGAELFTKEIEIEHILPFSRTLLDAESNLTVAHSSCNAFKAERSPFEAFGTNPSGYSWQEIIQRANQLKNTSKKNKFSPNAMDSFEKDSSFIARQLSDNQYIAKAALRYLKCLVENPSDVWTTNGSMTKLLRDKWEMDSILCRKFTEKEVALLGLKPEQIGNYKKNRFDHRHHAIDAVVIGLTDRSMVQKLATKNSHKGNRIEIPEFPILRSDLIEKVKNIVVSFKPDHGAEGKLSKETLLGKIKLHGKETFVCRENIVSLSEKNLDDIVDEIKSKVKDYVAKHKGQKIEAVLSDFSKENGIKKVRCVNRVQTPIEITSGKISRYLSPEDYFAAVIWEIPGEKKTFKAQYIRRNEVEKNSKGLNVVKPAVLENGKPHPAAKQVCLLHKDDYLEFSDKGKMYFCRIAGYAATNNKLDIRPVYAVSYCADWINSTNETMLTGYWKPTPTQNWVSVNVLFDKQKARLVTVSPIGRVFRK

SEQ ID NO: 373 - protein, 1011 aa, Unknown
  Uncultured delta polypeptide
MSSKAIDSLEQLDLFKPQEYTLGLDLGIKSIGWAILSGERIANAGVYLFETAEELNSTGNKLISKAAERGRKRRIRRMLDRKARRGRHIRYLLEREGLPTDELEEVVVHQSNRTLWDVRAEAVERKLTKQELAAVLFHLVRHRGYFPNTKKLPPDDESDSADEEQGKINRATSRLREELKASDCKTIGQFLAQNRDRQRNREGDYSNLMARKLVFEEALQILAFQRKQGHELSKDFEKTYLDVLMGQRSGRSPKLGNCSLIPSELRAPSSAPSTEWFKFLQNLGNLQISNAYREEWSIDAPRRAQIIDACSQRSTSSYWQIRRDFQIPDEYRFNLVNYERRDPDVDLQEYLQQQERKTLANFRNWKQLEKIIGTGHPIQTLDEAARLITLIKDDEKLSDQLADLLPEASDKAITQLCELDFTTAAKISLEAMYRILPHMNQGMGFFDACQQESLPEIGVPPAGDRVPPFDEMYNPVVNRVLSQSRKLINAVIDEYGMPAKIRVELARDLGKGRELRERIKLDQLDKSKQNDQRAEDFRAEFQQAPRGDQSLRYRLWKEQNCTCPYSGRMIPVNSVLSEDTQIDHILPISQSFDNSLSNKVLCFTEENAQKSNRTPFEYLDAADFQRLEAISGNWPEAKRNKLLHKSFGKVAEEWKSRALNDTRYLTSALADHLRHHLPDSKIQTVNGRITGYLRKQWGLEKDRDKHTHHAVDAIVVACTTPAIVQQVTLYHQDIRRYKKLGEKRPTPWPETFRQDVLDVEEEIFITRQPKKVSGGIQTKDTLRKHRSKPDRQRVALTKVKLADLERLVEKDASNRNLYEHLKQCLEESGDQPTKAFKAPFYMPSGPEAKQRPILSKVTLLREKPEPPKQLTELSGGRRYDSMAQGRLDIYRYKPGGKRKDEYRVVLQRMIDLMRGEENVHVFQKGVPYDQGPEIEQNYTFLFSLYFDDLVEFQRSADSEVIRGYYRTFNIANGQLKISTYLEGRQDFDFFGANRLAHFAKVQVNLLGKVIK

SEQ ID NO: 374 - protein, 1029 aa, Alicycliphilus denitrificans
MRSLRYRLALDLGSTSLGWALFRLDACNRPTAVIKAGVRIFSDGRNPKDGSSLAVTRRAARAMRRRRDRLLKRKTRMQAKLVEHGFFPADAGKRKALEQLNPYALRAKGLQEALLPGEFARALFHINQRRGFKSNRKTDKKDNDSGVLKKAIGQLRQQMAEQGSRTVGEYLWTRLQQGQGVRARYREKPYTTEEGKKRIDKSYDLYIDRAMIEQEFDALWAAQAAFNPTLFHEAARADLKDTLLHQRPLRPVKPGRCTLLPEEERAPLALPSTQRFRIHQEVNHLRLLDENLREVALTLAQRDAVVTALETKAKLSFEQIRKLLKLSGSVQFNLEDAKRTELKGNATSAALARKELFGAAWSGFDEALQDEIVWQLVTEEGEGALIAWLQTHTGVDEARAQAIVDVSLPEGYGNLSRKALARIVPALRAAVITYDKAVQAAGFDHHSQLGFEYDASEVEDLVHPETGEIRSVFKQLPYYGKALQRHVAFGSGKPEDPDEKRYGKIANPTVHIGLNQVRMVVNALIRRYGRPTEVVIELARDLKQSREQKVEAQRRQADNQRRNARIRRSIAEVLGIGEERVRGSDIQKWICWEELSFDAADRRCPYSGVQISAAMLLSDEVEVEHILPFSKTLDDSLNNRTVAMRQANRIKRNRTPWDARAEFEAQGWSYEDILQRAERMPLRKRYRFAPDGYERWLGDDKDFLARALNDTRYLSRVAAEYLRLVCPGTRVIPGQLTALLRGKFGLNDVLGLDGEKNRNDHRHHAVDACVIGVTDQGLMQRFATASAQARGDGLTRLVDGMPMPWPTYRDHVERAVRHIWVSHRPDHGFEGAMMEETSYGIRKDGSIKQRRKADGSAGREISNLIRIHEATQPLRHGVSADGQPLAYKGYVGGSNYCIEITVNDKGKWEGEVISTFRAYGVVRAGGMGRLRNPHEGQNGRKLIMRLVIGDSVRLEVDGAERTMRIVKISGSNGQIFMAPIHEANVDARNTDKQDAFTYTSKYAGSLQKAKTRRVTISPIGEVRDPGFKG

SEQ ID NO: 375 - protein, 1168 aa, Azospirillum sp.
MARPAFRAPRREHVNGWTPDPHRISKPFFILVSWHLLSRVVIDSSSGCFPGTSRDHTDKFAEWECAVQPYRLSFDLGTNSIGWGLLNLDRQGKPREIRALGSRIFSDGRDPQDKASLAVARRLARQMRRRRDRYLTRRTRLMGALVRFGLMPADPAARKRLEVAVDPYLARERATRERLEPFEIGRALFHLNQRRGYKPVRTATKPDEEAGKVKEAVERLEAAIAAAGAPTLGAWFAWRKTRGETLRARLAGKGKEAAYPFYPARRMLEAEFDTLWAEQARHHPDLLTAEAREILRHRIFHQRPLKPPPVGRCTLYPDDGRAPRALPSAQRLRLFQELASLRVIHLDLSERPLTPAERDRIVAFVQGRPPKAGRKPGKVQKSVPFEKLRGLLELPPGTGFSLESDKRPELLGDETGARIAPAFGPGWTALPLEEQDALVELLLTEAEPERAIAALTARWALDEATAAKLAGATLPDFHGRYGRRAVAELLPVLERETRGDPDGRVRPIRLDEAVKLLRGGKDHSDFSREGALLDALPYYGAVLERHVAFGTGNPADPEEKRVGRVANPTVHIALNQLRHLVNAILARHGRPEEIVIELARDLKRSAEDRRREDKRQADNQKRNEERKRLILSLGERPTPRNLLKLRLWEEQGPVENRRCPYSGETISMRMLLSEQVDIDHILPFSVSLDDSAANKVVCLREANRIKRNRSPWEAFGHDSERWAGILARAEALPKNKRWRFAPDALEKLEGEGGLRARHLNDTRHLSRLAVEYLRCVCPKVRVSPGRLTALLRRRWGIDAILAEADGPPPEVPAETLDPSPAEKNRADHRHHALDAVVIGCIDRSMVQRVQLAAASAEREAAAREDNIRRVLEGFKEEPWDGFRAELERRARTIVVSHRPEHGIGGALHKETAYGPVDPPEEGFNLVVRKPIDGLSKDEINSVRDPRLRRALIDRLAIRRRDANDPATALAKAAEDLAAQPASRGIRRVRVLKKESNPIRVEHGGNPSGPRSGGPFHKLLLAGEVHHVDVALRADGRRWVGHWVTLFEAHGGRGADGAAAPPRLGDGERFLMRLHKGDCLKLEHKGRVRVMQVVKLEPSSNSVVVVEPHQVKTDRSKHVKISCDQLRARGARRVTVDPLGRVRVHAPGARVGIGGDAGRTAMEPAEDIS

SEQ ID NO: 376 - protein, 1064 aa, Bradyrhizobium sp.
MKRTSLRAYRLGVDLGANSLGWFVVWLDDHGQPEGLGPGGVRIFPDGRNPQSKQSNAAGRRLARSARRRRDRYLQRRGKLMGLLVKHGLMPADEPARKRLECLDPYGLRAKALDEVLPLHHVGRALFHLNQRRGLFANRAIEQGDKDASAIKAAAGRLQTSMQACGARTLGEFLNRRHQLRATVRARSPVGGDVQARYEFYPTRAMVDAEFEAIWAAQAPHHPTMTAEAHDTIREAIFSQRAMKRPSIGKCSLDPATSQDDVDGFRCAWSHPLAQRFRIWQDVRNLAVVETGPTSSRLGKEDQDKVARALLQTDQLSFDEIRGLLGLPSDARFNLESDRRDHLKGDATGAILSARRHFGPAWHDRSLDRQIDIVALLESALDEAAIIASLGTTHSLDEAAAQRALSALLPDGYCRLGLRAIKRVLPLMEAGRTYAEAASAAGYDHALLPGGKLSPTGYLPYYGQWLQNDVVGSDDERDTNERRWGRLPNPTVHIGIGQLRRVVNELIRWHGPPAEITVELTRDLKLSPRRLAELEREQAENQRKNDKRTSLLRKLGLPASTHNLLKLRLWDEQGDVASECPYTGEAIGLERLVSDDVDIDHLIPFSISWDDSAANKVVCMRYANREKGNRTPFEAFGHRQGRPYDWADIAERAARLPRGKRWRFGPGARAQFEELGDFQARLLNETSWLARVAKQYLAAVTHPHRIHVLPGRLTALLRATWELNDLLPGSDDRAAKSRKDHRHHAIDALVAALTDQALLRRMANAHDDTRRKIEVLLPWPTFRIDLETRLKAMLVSHKPDHGLQARLHEDTAYGTVEHPETEDGANLVYRKTFVDISEKEIDRIRDRRLRDLVRAHVAGERQQGKTLKAAVLSFAQRRDIAGHPNGIRHVRLTKSIKPDYLVPIRDKAGRIYKSYNAGENAFVDILQAESGRWIARATTVFQANQANESHDAPAAQPIMRVFKGDMLRIDHAGAEKFVKIVRLSPSNNLLYLVEHHQAGVFQTRHDDPEDSFRWLFASFDKLREWNAELVRIDTLGQPWRRKRGLETGSEDATRIGWTRPKKWP

SEQ ID NO: 377 - protein, 1037 aa, Parvibaculum lavamentivorans
MERIFGFDIGTTSIGFSVIDYSSTQSAGNIQRLGVRIFPEARDPDGTPLNQQRRQKRMMRRQLRRRRIRRKALNETLHEAGFLPAYGSADWPVVMADEPYELRRRGLEEGLSAYEFGRAIYHLAQHRHFKGRELEESDTPDPDVDDEKEAANERAATLKALKNEQTTLGAWLARRPPSDRKRGIHAHRNVVAEEFERLWEVQSKFHPALKSEEMRARISDTIFAQRPVFWRKNTLGECRFMPGEPLCPKGSWLSQQRRMLEKLNNLAIAGGNARPLDAEERDAILSKLQQQASMSWPGVRSALKALYKQRGEPGAEKSLKFNLELGGESKLLGNALEAKLADMFGPDWPAHPRKQEIRHAVHERLWAADYGETPDKKRVIILSEKDRKAHREAAANSFVADFGITGEQAAQLQALKLPTGWEPYSIPALNLFLAELEKGERFGALVNGPDWEGWRRTNFPHRNQPTGEILDKLPSPASKEERERISQLRNPTVVRTQNELRKVVNNLIGLYGKPDRIRIEVGRDVGKSKREREEIQSGIRRNEKQRKKATEDLIKNGIANPSRDDVEKWILWKEGQERCPYTGDQIGFNALFREGRYEVEHIWPRSRSFDNSPRNKTLCRKDVNIEKGNRMPFEAFGHDEDRWSAIQIRLQGMVSAKGGTGMSPGKVKRFLAKTMPEDFAARQLNDTRYAAKQILAQLKRLWPDMGPEAPVKVEAVTGQVTAQLRKLWTLNNILADDGEKTRADHRHHAIDALTVACTHPGMTNKLSRYWQLRDDPRAEKPALTPPWDTIRADAEKAVSEIVVSHRVRKKVSGPLHKETTYGDTGTDIKTKSGTYRQFVTRKKIESLSKGELDEIRDPRIKEIVAAHVAGRGGDPKKAFPPYPCVSPGGPEIRKVRLTSKQQLNLMAQTGNGYADLGSNHHIAIYRLPDGKADFEIVSLFDASRRLAQRNPIVQRTRADGASFVMSLAAGEAIMIPEGSKKGIWIVQGVWASGQVVLERDTDADHSTTTRPMPNPILKDDAKKVSIDPIGRVRPSND

SEQ ID NO: 378 - protein, 1218 aa, Prevotella timonensis
MNKRILGLDTGTNSLGWAVVDWDEHAQSYELIKYGDVIFQEGVKIEKGIESSKAAERSGYKAIRKQYFRRRLRKIQVLKVLVKYHLCPYLSDDDLRQWHLQKQYPKSDELMLWQRTSDEEGKNPYYDRHRCLHEKLDLTVEADRYTLGRALYHLTQRRGFLSNRLDTSADNKEDGVVKSGISQLSTEMEEAGCEYLGDYFYKLYDAQGNKVRIRQRYTDRNKHYQHEFDAICEKQELSSELIEDLQRAIFFQLPLKSQRHGVGRCTFERGKPRCADSHPDYEEFRMLCFVNNIQVKGPHDLELRPLTYEEREKIEPLFFRKSKPNFDFEDIAKALAGKKNYAWIHDKEERAYKFNYRMTQGVPGCPTIAQLKSIFGDDWKTGIAETYTLIQKKNGSKSLQEMVDDVWNVLYSFSSVEKLKEFAHHKLQLDEESAEKFAKIKLSHSFAALSLKAIRKFLPFLRKGMYYTHASFFANIPTIVGKEIWNKEQNRKYIMENVGELVFNYQPKHREVQGTIEMLIKDFLANNFELPAGATDKLYHPSMIETYPNAQRNEFGILQLGSPRTNAIRNPMAMRSLHILRRVVNQLLKESIIDENTEVHVEYARELNDANKRRAIADRQKEQDKQHKKYGDEIRKLYKEETGKDIEPTQTDVLKFQLWEEQNHHCLYTGEQIGITDFIGSNPKFDIEHTIPQSVGGDSTQMNLTLCDNRFNREVKKAKLPTELANHEEILTRIEPWKNKYEQLVKERDKQRTFAGMDKAVKDIRIQKRHKLQMEIDYWRGKYERFTMTEVPEGFSRRQGTGIGLISRYAGLYLKSLFHQADSRNKSNVYVVKGVATAEFRKMWGLQSEYEKKCRDNHSHHCMDAITIACIGKREYDLMAEYYRMEETFKQGRGSKPKFSKPWATFTEDVLNIYKNLLVVHDTPNNMPKHTKKYVQTSIGKVLAQGDTARGSLHLDTYYGAIERDGEIRYVVRRPLSSFTKPEELENIVDETVKRTIKEAIADKNFKQAIAEPIYMNEEKGILIKKVRCFAKSVKQPINIRQHRDLSKKEYKQQYHVMNENNYLLAIYEGLVKNKVVREFEIVSYIEAAKYYKRSQDRNIFSSIVPTHSTKYGLPLKTKLLMGQLVLMFEENPDEIQVDNTKDLVKRLYKVVGIEKDGRIKFKYHQEARKEGLPIFSTPYKNNDDYAPIFRQSINNINILVDGIDFTIDILGKVTLKE

SEQ ID NO: 379 - protein, 1088 aa, Bacillus smithii
MNYKMGLDIGIASVGWAVINLDLKRIEDLGVRIFDKAEHPQNGESLALPRRIARSARRRLRRRKHRLERIRRLLVSENVLTKEEMNLLFKQKKQIDVWQLRVDALERKLNNDELARVLLHLAKRRGFKSNRKSERNSKESSEFLKNIEENQSILAQYRSVGEMIVKDSKFAYHKRNKLDSYSNMIARDDLEREIKLIFEKQREFNNPVCTERLEEKYLNIWSSQRPFASKEDIEKKVGFCTFEPKEKRAPKATYTFQSFIVWEHINKLRLVSPDETRALTEIERNLLYKQAFSKNKMTYYDIRKLLNLSDDIHFKGLLYDPKSSLKQIENIRFLELDSYHKIRKCIENVYGKDGIRMFNETDIDTFGYALTIFKDDEDIVAYLQNEYITKNGKRVSNLANKVYDKSLIDELLNLSFSKFAHLSMKAIRNILPYMEQGEIYSKACELAGYNFTGPKKKEKALLLPVIPNIANPVVMRALTQSRKVVNAIIKKYGSPVSIHIELARDLSHSFDERKKIQKDQTENRKKNETAIKQLIEYELTKNPTGLDIVKFKLWSEQQGRCMYSLKPIELERLLEPGYVEVDHILPYSRSLDDSYANKVLVLTKENREKGNHTPVEYLGLGSERWKKFEKFVLANKQFSKKKKQNLLRLRYEETEEKEFKERNLNDTRYISKFFANFIKEHLKFADGDGGQKVYTINGKITAHLRSRWDFNKNREESDLHHAVDAVIVACATQGMIKKITEFYKAREQNKESAKKKEPIFPQPWPHFADELKARLSKFPQESIEAFALGNYDRKKLESLRPVFVSRMPKRSVTGAAHQETLRRCVGIDEQSGKIQTAVKTKLSDIKLDKDGHFPMYQKESDPRTYEAIRQRLLEHNNDPKKAFQEPLYKPKKNGEPGPVIRTVKIIDTKNKVVHLDGSKTVAYNSNIVRTDVFEKDGKYYCVPVYTMDIMKGTLPNKAIEANKPYSEWKEMTEEYTFQFSLFPNDLVRIVLPREKTIKTSTNEEIIIKDIFAYYKTIDSATGGLELISHDRNFSLRGVGSKTLKRFEKYQVDVLGNIHKVKGEKRVGLAAPTNQKKGKTVDSLQSVSD

SEQ ID NO: 380 - protein, 1035 aa, Puniceispirillum marinum
MRRLGLDLGTNSIGWCLLDLGDDGEPVSIFRTGARIFSDGRDPKSLGSLKATRREARLTRRRRDRFIQRQKNLINALVKYGLMPADEIQRQALAYKDPYPIRKKALDEAIDPYEMGRAIFHINQRRGFKSNRKSADNEAGVVKQSIADLEMKLGEAGARTIGEFLADRQATNDTVRARRLSGTNALYEFYPDRYMLEQEFDTLWAKQAAFNPSLYIEAARERLKEIVFFQRKLKPQEVGRCIFLSDEDRISKALPSFQRFRIYQELSNLAWIDHDGVAHRITASLALRDHLFDELEHKKKLTFKAMRAILRKQGVVDYPVGFNLESDNRDHLIGNLTSCIMRDAKKMIGSAWDRLDEEEQDSFILMLQDDQKGDDEVRSILTQQYGLSDDVAEDCLDVRLPDGHGSLSKKAIDRILPVLRDQGLIYYDAVKEAGLGEANLYDPYAALSDKLDYYGKALAGHVMGASGKFEDSDEKRYGTISNPTVHIALNQVRAVVNELIRLHGKPDEVVIEIGRDLPMGADGKRELERFQKEGRAKNERARDELKKLGHIDSRESRQKFQLWEQLAKEPVDRCCPFTGKMMSISDLFSDKVEIEHLLPFSLTLDDSMANKTVCFRQANRDKGNRAPFDAFGNSPAGYDWQEILGRSQNLPYAKRWRFLPDAMKRFEADGGFLERQLNDTRYISRYTTEYISTIIPKNKIWVVTGRLTSLLRGFWGLNSILRGHNTDDGTPAKKSRDDHRHHAIDAIVVGMTSRGLLQKVSKAARRSEDLDLTRLFEGRIDPWDGFRDEVKKHIDAIIVSHRPRKKSQGALHNDTAYGIVEHAENGASTVVHRVPITSLGKQSDIEKVRDPLIKSALLNETAGLSGKSFENAVQKWCADNSIKSLRIVETVSIIPITDKEGVAYKGYKGDGNAYMDIYQDPTSSKWKGEIVSRFDANQKGFIPSWQSQFPTARLIMRLRINDLLKLQDGEIEEIYRVQRLSGSKILMAPHTEANVDARDRDKNDTFKLTSKSPGKLQSASARKVHISPTGLIREG

SEQ ID NO: 381 - protein, 1153 aa, Barnesiella intestinihominis
MKNILGLDLGLSSIGWSVIRENSEEQELVAMGSRVVSLTAAELSSFTQGNGVSINSQRTQKRTQRKGYDRYQLRRTLLRNKLDTLGMLPDDSLSYLPKLQLWGLRAKAVTQRIELNELGRVLLHLNQKRGYKSIKSDFSGDKKITDYVKTVKTRYDELKEMRLTIGELFFRRLTENAFFRCKEQVYPRQAYVEEFDCIMNCQRKFYPDILTDETIRCIRDEIIYYQRPLKSCKYLVSRCEFEKRFYLNAAGKKTEAGPKVSPRTSPLFQVCRLWESINNIVVKDRRNEIVFISAEQRAALFDFLNTHEKLKGSDLLKLLGLSKTYGYRLGEQFKTGIQGNKTRVEIERALGNYPDKKRLLQFNLQEESSSMVNTETGEIIPMISLSFEQEPLYRLWHVLYSIDDREQLQSVLRQKFGIDDDEVLERLSAIDLVKAGFGNKSSKAIRRILPFLQLGMNYAEACEAAGYNHSNNYTKAENEARALLDRLPAIKKNELRQPVVEKILNQMVNVVNALMEKYGRFDEIRVELARELKQSKEERSNTYKSINKNQRENEQIAKRIVEYGVPTRSRIQKYKMWEESKHCCIYCGQPVDVGDFLRGFDVEVEHIIPKSLYFDDSFANKVCSCRSCNKEKNNRTAYDYMKSKGEKALSDYVERVNTMYTNNQISKTKWQNLLTPVDKISIDFIDRQLRESQYIARKAKEILTSICYNVTATSGSVTSFLRHVWGWDTVLHDLNFDRYKKVGLTEVIEVNHRGSVIRREQIKDWSKRFDHRHHAIDALTIACTKQAYIQRLNNLRAEEGPDFNKMSLERYIQSQPHFSVAQVREAVDRILVSFRAGKRAVTPGKRYIRKNRKRISVQSVLIPRGALSEESVYGVIHVWEKDEQGHVIQKQRAVMKYPITSINREMLDKEKVVDKRIHRILSGRLAQYNDNPKEAFAKPVYIDKECRIPIRTVRCFAKPAINTLVPLKKDDKGNPVAWVNPGNNHHVAIYRDEDGKYKERTVTFWEAVDRCRVGIPAIVTQPDTIWDNILQRNDISENVLESLPDVKWQFVLSLQQNEMFILGMNEEDYRYAMDQQDYALLNKYLYRVQKLSKSDYSFRYHTETSVEDKYDGKPNLKLSMQMGKLKRVSIKSLLGLNPHKVHISVLGEIKEIS

SEQ ID NO: 382 - protein, 1062 aa, Ralstonia syzygii
MAEKQHRWGLDIGTNSIGWAVIALIEGRPAGLVATGSRIFSDGRNPKDGSSLAVERRGPRQMRRRRDRYLRRRDRFMQALINVGLMPGDAAARKALVTENPYVLRQRGLDQALTLPEFGRALFHLNQRRGFQSNRKTDRATAKESGKVKNAIAAFRAGMGNARTVGEALARRLEDGRPVRARMVGQGKDEHYELYIAREWIAQEFDALWASQQRFHAEVLADAARDRLRAILLFQRKLLPVPVGKCFLEPNQPRVAAALPSAQRFRLMQELNHLRVMTLADKRERPLSFQERNDLLAQLVARPKCGFDMLRKIVFGANKEAYRFTIESERRKELKGCDTAAKLAKVNALGTRWQALSLDEQDRLVCLLLDGENDAVLADALREHYGLTDAQIDTLLGLSFEDGHMRLGRSALLRVLDALESGRDEQGLPLSYDKAVVAAGYPAHTADLENGERDALPYYGELLWRYTQDAPTAKNDAERKFGKIANPTVHIGLNQLRKLVNALIQRYGKPAQIVVELARNLKAGLEEKERIKKQQTANLERNERIRQKLQDAGVPDNRENRLRMRLFEELGQGNGLGTPCIYSGRQISLQRLFSNDVQVDHILPFSKTLDDSFANKVLAQHDANRYKGNRGPFEAFGANRDGYAWDDIRARAAVLPRNKRNRFAETAMQDWLHNETDFLARQLTDTAYLSRVARQYLTAICSKDDVYVSPGRLTAMLRAKWGLNRVLDGVMEEQGRPAVKNRDDHRHHAIDAVVIGATDRAMLQQVATLAARAREQDAERLIGDMPTPWPNFLEDVRAAVARCVVSHKPDHGPEGGLHNDTAYGIVAGPFEDGRYRVRHRVSLFDLKPGDLSNVRCDAPLQAELEPIFEQDDARAREVALTALAERYRQRKVWLEELMSVLPIRPRGEDGKTLPDSAPYKAYKGDSNYCYELFINERGRWDGELISTFRANQAAYRRFRNDPARFRRYTAGGRPLLMRLCINDYIAVGTAAERTIFRVVKMSENKITLAEHFEGGTLKQRDADKDDPFKYLTKSPGALRDLGARRIFVDLIGRVLDPGIKGD

SEQ ID NO: 383 - protein, 1059 aa, Wolinella succinogenes
MIERILGVDLGISSLGWAIVEYDKDDEAANRIIDCGVRLFTAAETPKKKESPNKARREARGIRRVLNRRRVRMNMIKKLFLRAGLIQDVDLDGEGGMFYSKANRADVWELRHDGLYRLLKGDELARVLIHIAKHRGYKFIGDDEADEESGKVKKAGVVLRQNFEAAGCRTVGEWLWRERGANGKKRNKHGDYEISIHRDLLVEEVEAIFVAQQEMRSTIATDALKAAYREIAFFVRPMQRIEKMVGHCTYFPEERRAPKSAPTAEKFIAISKFFSTVIIDNEGWEQKIIERKTLEELLDFAVSREKVEFRHLRKFLDLSDNEIFKGLHYKGKPKTAKKREATLFDPNEPTELEFDKVEAEKKAWISLRGAAKLREALGNEFYGRFVALGKHADEATKILTYYKDEGQKRRELTKLPLEAEMVERLVKIGFSDFLKLSLKAIRDILPAMESGARYDEAVLMLGVPHKEKSAILPPLNKTDIDILNPTVIRAFAQFRKVANALVRKYGAFDRVHFELAREINTKGEIEDIKESQRKNEKERKEAADWIAETSFQVPLTRKNILKKRLYIQQDGRCAYTGDVIELERLFDEGYCEIDHILPRSRSADDSFANKVLCLARANQQKTDRTPYEWFGHDAARWNAFETRTSAPSNRVRTGKGKIDRLLKKNFDENSEMAFKDRNLNDTRYMARAIKTYCEQYWVFKNSHTKAPVQVRSGKLTSVLRYQWGLESKDRESHTHHAVDAIIIAFSTQGMVQKLSEYYRFKETHREKERPKLAVPLANFRDAVEEATRIENTETVKEGVEVKRLLISRPPRARVTGQAHEQTAKPYPRIKQVKNKKKWRLAPIDEEKFESFKADRVASANQKNFYETSTIPRVDVYHKKGKFHLVPIYLHEMVLNELPNLSLGTNPEAMDENFFKFSIFKDDLISIQTQGTPKKPAKIIMGYFKNMHGANMVLSSINNSPCEGFTCTPVSMDKKHKDKCKLCPEENRIAGRCLQGFLDYWSQEGLRPPRKEFECDQGVKFALDVKKYQIDPLGYYYEVKQEKRLGTIPQMRSAKKLVKK

SEQ ID NO: 384 - protein, 1269 aa, Mycoplasma gallisepticum
MNNSIKSKPEVTIGLDLGVGSVGWAIVDNETNIIHHLGSRLFSQAKTAEDRRSFRGVRRLIRRRKYKLKRFVNLIWKYNSYFGFKNKEDILNNYQEQQKLHNTVLNLKSEALNAKIDPKALSWILHDYLKNRGHFYEDNRDFNVYPTKELAKYFDKYGYYKGIIDSKEDNDNKLEEELTKYKFSNKHWLEEVKKVLSNQTGLPEKFKEEYESLFSYVRNYSEGPGSINSVSPYGIYHLDEKEGKVVQKYNNIWDKTIGKCNIFPDEYRAPKNSPIAMIFNEINELSTIRSYSIYLTGWFINQEFKKAYLNKLLDLLIKTNGEKPIDARQFKKLREETIAESIGKETLKDVENEEKLEKEDHKWKLKGLKLNTNGKIQYNDLSSLAKFVHKLKQHLKLDFLLEDQYATLDKINFLQSLFVYLGKHLRYSNRVDSANLKEFSDSNKLFERILQKQKDGLFKLFEQTDKDDEKILAQTHSLSTKAMLLAITRMTNLDNDEDNQKNNDKGWNFEAIKNFDQKFIDITKKNNNLSLKQNKRYLDDRFINDAILSPGVKRILREATKVFNAILKQFSEEYDVTKVVIELARELSEEKELENTKNYKKLIKKNGDKISEGLKALGISEDEIKDILKSPTKSYKFLLWLQQDHIDPYSLKEIAFDDIFTKTEKFEIDHIIPYSISFDDSSSNKLLVLAESNQAKSNQTPYEFISSGNAGIKWEDYEAYCRKFKDGDSSLLDSTQRSKKFAKMMKTDTSSKYDIGFLARNLNDTRYATIVFRDALEDYANNHLVEDKPMFKVVCINGSVTSFLRKNFDDSSYAKKDRDKNIHHAVDASIISIFSNETKTLFNQLTQFADYKLFKNTDGSWKKIDPKTGVVTEVTDENWKQIRVRNQVSEIAKVIEKYIQDSNIERKARYSRKIENKTNISLFNDTVYSAKKVGYEDQIKRKNLKTLDIHESAKENKNSKVKRQFVYRKLVNVSLLNNDKLADLFAEKEDILMYRANPWVINLAEQIFNEYTENKKIKSQNVFEKYMLDLTKEFPEKFSEFLVKSMLRNKTAIIYDDKKNIVHRIKRLKMLSSELKENKLSNVIIRSKNQSGTKLSYQDTINSLALMIMRSIDPTAKKQYIRVPLNTLNLHLGDHDFDLHNMDAYLKKPKFVKYLKANEIGDEYKPWRVLTSGTLLIHKKDKKLMYISSFQNLNDVIEIKNLIETEYKENDDSDSKKKKKANRFLMTLSTILNDYILLDAKDNFDILGLSKNRIDEILNSKLGLDKIVK

SEQ ID NO: 385 - protein, 1138 aa, Acidothermus cellulolyticus
MGGSEVGTVPVTWRLGVDVGERSIGLAAVSYEEDKPKEILAAVSWIHDGGVGDERSGASRLALRGMARRARRLRRFRRARLRDLDMLLSELGWTPLPDKNVSPVDAWLARKRLAEEYVVDETERRRLLGYAVSHMARHRGWRNPWTTIKDLKNLPQPSDSWERTRESLEARYSVSLEPGTVGQWAGYLLQRAPGIRLNPTQQSAGRRAELSNATAFETRLRQEDVLWELRCIADVQGLPEDVVSNVIDAVFCQKRPSVPAERIGRDPLDPSQLRASRACLEFQEYRIVAAVANLRIRDGSGSRPLSLEERNAVIEALLAQTERSLTWSDIALEILKLPNESDLTSVPEEDGPSSLAYSQFAPFDETSARIAEFIAKNRRKIPTFAQWWQEQDRTSRSDLVAALADNSIAGEEEQELLVHLPDAELEALEGLALPSGRVAYSRLTLSGLTRVMRDDGVDVHNARKTCFGVDDNWRPPLPALHEATGHPVVDRNLAILRKFLSSATMRWGPPQSIVVELARGASESRERQAEEEAARRAHRKANDRIRAELRASGLSDPSPADLVRARLLELYDCHCMYCGAPISWENSELDHIVPRTDGGSNRHENLAITCGACNKEKGRRPFASWAETSNRVQLRDVIDRVQKLKYSGNMYWTRDEFSRYKKSVVARLKRRTSDPEVIQSIESTGYAAVALRDRLLSYGEKNGVAQVAVFRGGVTAEARRWLDISIERLFSRVAIFAQSTSTKRLDRRHHAVDAVVLTTLTPGVAKTLADARSRRVSAEFWRRPSDVNRHSTEEPQSPAYRQWKESCSGLGDLLISTAARDSIAVAAPLRLRPTGALHEETLRAFSEHTVGAAWKGAELRRIVEPEVYAAFLALTDPGGRFLKVSPSEDVLPADENRHIVLSDRVLGPRDRVKLFPDDRGSIRVRGGAAYIASFHHARVFRWGSSHSPSFALLRVSLADLAVAGLLRDGVDVFTAELPPWTPAWRYASIALVKAVESGDAKQVGWLVPGDELDFGPEGVTTAAGDLSMFLKYFPERHWVVTGFEDDKRINLKPAFLSAEQAEVLRTERSDRPDTLTEAGEILAQFFPRCWRATVAKVLCHPGLTVIRRTALGQPRWRRGHLPYSWRPWSADPWSGGTP

SEQ ID NO: 386 - protein, 1265 aa, Mycoplasma ovipneumoniae
MHNKKNITIGFDLGIASIGWAIIDSTTSKILDWGTRTFEERKTANERRAFRSTRRNIRRKAYRNQRFINLILKYKDLFELKNISDIQRANKKDTENYEKIISFFTEIYKKCAAKHSNILEVKVKALDSKIEKLDLIWILHDYLENRGFFYDLEEENVADKYEGIEHPSILLYDFFKKNGFFKSNSSIPKDLGGYSFSNLQWVNEIKKLFEVQEINPEFSEKFLNLFTSVRDYAKGPGSEHSASEYGIFQKDEKGKVFKKYDNIWDKTIGKCSFFVEENRSPVNYPSYEIFNLLNQLINLSTDLKTTNKKIWQLSSNDRNELLDELLKVKEKAKIISISLKKNEIKKIILKDFGFEKSDIDDQDTIEGRKIIKEEPTTKLEVTKHLLATIYSHSSDSNWININNILEFLPYLDAICIILDREKSRGQDEVLKKLTEKNIFEVLKIDREKQLDFVKSIFSNTKFNFKKIGNFSLKAIREFLPKMFEQNKNSEYLKWKDEEIRRKWEEQKSKLGKTDKKTKYLNPRIFQDEIISPGTKNTFEQAVLVLNQIIKKYSKENIIDAIIIESPREKNDKKTIEEIKKRNKKGKGKTLEKLFQILNLENKGYKLSDLETKPAKLLDRLRFYHQQDGIDLYTLDKINIDQLINGSQKYEIEHIIPYSMSYDNSQANKILTEKAENLKKGKLIASEYIKRNGDEFYNKYYEKAKELFINKYKKNKKLDSYVDLDEDSAKNRFRFLTLQDYDEFQVEFLARNLNDTRYSTKLFYHALVEHFENNEFFTYIDENSSKHKVKISTIKGHVTKYFRAKPVQKNNGPNENLNNNKPEKIEKNRENNEHHAVDAAIVAIIGNKNPQIANLLTLADNKTDKKFLLHDENYKENIETGELVKIPKFEVDKLAKVEDLKKIIQEKYEEAKKHTAIKFSRKTRTILNGGLSDETLYGFKYDEKEDKYFKIIKKKLVTSKNEELKKYFENPFGKKADGKSEYTVLMAQSHLSEFNKLKEIFEKYNGFSNKTGNAFVEYMNDLALKEPTLKAEIESAKSVEKLLYYNFKPSDQFTYHDNINNKSFKRFYKNIRIIEYKSIPIKFKILSKHDGGKSFKDTLFSLYSLVYKVYENGKESYKSIPVTSQMRNFGIDEFDFLDENLYNKEKLDIYKSDFAKPIPVNCKPVFVLKKGSILKKKSLDIDDFKETKETEEGNYYFISTISKRFNRDTAYGLKPLKLSVVKPVAEPSTNPIFKEYIPIHLDELGNEYPVKIKEHTDDEKLMCTIK

SEQ ID NO: 387 - RNA, 20 nt, Artificial Sequence
  Synthetic:  Oligonucleotide AAVS-1
guccccuccaccccacagug

SEQ ID NO: 388 - RNA, 20 nt, Artificial Sequence
  Synthetic:  Oligonucleotide TRBC-210
gcgcugacgaucugggugac

SEQ ID NO: 389 - RNA, 20 nt, Artificial Sequence
  Synthetic:  Oligonucleotide TRAC-4
gcugguacacggcaggguca

SEQ ID NO: 390 - RNA, 24 nt, Artificial Sequence
  Synthetic:  Oligonucleotide TRAC-233
gugaauaggcagacagacuuguca

SEQ ID NO: 391 - DNA, 1072 bp, Artificial Sequence
  Synthetic:  5H arm
ataggaacttgaatcaaggaaatgattttaaaacgcagtattcttagtggactagaggaaaaaaataatctgagccaagtagaagaccttttcccctcctacccctactttctaagtcacagaggctttttgttcccccagacactcttgcagattagtccaggcagaaacagttagatgtccccagttaacctcctatttgacaccactgattaccccattgatagtcacactttgggttgtaagtgactttttatttatttgtatttttgactgcattaagaggtctctagttttttatctcttgtttcccaaaacctaataagtaactaatgcacagagcacattgatttgtatttattctatttttagacataatttattagcatgcatgagcaaattaagaaaaacaacaacaaatgaatgcatatatatgtatatgtatgtgtgtatatatacacacatatatatatatattttttcttttcttaccagaaggttttaatccaaataaggagaagatatgcttagaaccgaggtagagttttcatccattctgtcctgtaagtattttgcatattctggagacgcaggaagagatccatctacatatcccaaagctgaattatggtagacaaaactcttccacttttagtgcatcaacttcttatttgtgtaataagaaaattgggaaaacgatcttcaatatgcttaccaagctgtgattccaaatattacgtaaatacacttgcaaaggaggatgtttttagtagcaatttgtactgatggtatggggccaagagatatatcttagagggagggctgagggtttgaagtccaactcctaagccagtgccagaagagccaaggacaggtacggctgtcatcacttagacctcaccctgtggagccacaccctagggttggccaatctactcccaggagcagggagggcaggagccagggctgggcataaaagtcagggcagagccatctattgcttacatttgcttctgacacaactgtgttcactagcaacctcaaacagacaccatggtgcatctgactcctg

SEQ ID NO: 392 - DNA, 1128 bp, Artificial Sequence
  Synthetic:  3H arm
ggagaagtctgccgttactgccctgtggggcaaggtgaacgtggatgaagttggtggtgaggccctgggcaggttggtatcaaggttacaagacaggtttaaggagaccaatagaaactgggcatgtggagacagagaagactcttgggtttctgataggcactgactctctctgcctattggtctattttcccacccttaggctgctggtggtctacccttggacccagaggttctttgagtcctttggggatctgtccactcctgatgctgttatgggcaaccctaaggtgaaggctcatggcaagaaagtgctcggtgcctttagtgatggcctggctcacctggacaacctcaagggcacctttgccacactgagtgagctgcactgtgacaagctgcacgtggatcctgagaacttcagggtgagtctatgggacgcttgatgttttctttccccttcttttctatggttaagttcatgtcataggaaggggataagtaacagggtacagtttagaatgggaaacagacgaatgattgcatcagtgtggaagtctcaggatcgttttagtttcttttatttgctgttcataacaattgttttcttttgtttaattcttgctttctttttttttcttctccgcaatttttactattatacttaatgccttaacattgtgtataacaaaaggaaatatctctgagatacattaagtaacttaaaaaaaaactttacacagtctgcctagtacattactatttggaatatatgtgtgcttatttgcatattcataatctccctactttattttcttttatttttaattgatacataatcattatacatatttatgggttaaagtgtaatgttttaatatgtgtacacatattgaccaaatcagggtaattttgcatttgtaattttaaaaaatgctttcttcttttaatatacttttttgtttatcttatttctaatactttccctaatctctttctttcagggcaataatgatacaatgtatcatgcctctttgcaccattctaaagaataacagtgataatttctgggttaaggcaatagcaatatctctgcatataaatatttctgcatataaattgtaactg

SEQ ID NO: 393 - DNA, 2201 bp, Artificial Sequence
  Synthetic:  Template Construct 1
ataggaacttgaatcaaggaaatgattttaaaacgcagtattcttagtggactagaggaaaaaaataatctgagccaagtagaagaccttttcccctcctacccctactttctaagtcacagaggctttttgttcccccagacactcttgcagattagtccaggcagaaacagttagatgtccccagttaacctcctatttgacaccactgattaccccattgatagtcacactttgggttgtaagtgactttttatttatttgtatttttgactgcattaagaggtctctagttttttatctcttgtttcccaaaacctaataagtaactaatgcacagagcacattgatttgtatttattctatttttagacataatttattagcatgcatgagcaaattaagaaaaacaacaacaaatgaatgcatatatatgtatatgtatgtgtgtatatatacacacatatatatatatattttttcttttcttaccagaaggttttaatccaaataaggagaagatatgcttagaaccgaggtagagttttcatccattctgtcctgtaagtattttgcatattctggagacgcaggaagagatccatctacatatcccaaagctgaattatggtagacaaaactcttccacttttagtgcatcaacttcttatttgtgtaataagaaaattgggaaaacgatcttcaatatgcttaccaagctgtgattccaaatattacgtaaatacacttgcaaaggaggatgtttttagtagcaatttgtactgatggtatggggccaagagatatatcttagagggagggctgagggtttgaagtccaactcctaagccagtgccagaagagccaaggacaggtacggctgtcatcacttagacctcaccctgtggagccacaccctagggttggccaatctactcccaggagcagggagggcaggagccagggctgggcataaaagtcagggcagagccatctattgcttacatttgcttctgacacaactgtgttcactagcaacctcaaacagacaccatggtgcatctgactcctgaggagaagtctgccgttactgccctgtggggcaaggtgaacgtggatgaagttggtggtgaggccctgggcaggttggtatcaaggttacaagacaggtttaaggagaccaatagaaactgggcatgtggagacagagaagactcttgggtttctgataggcactgactctctctgcctattggtctattttcccacccttaggctgctggtggtctacccttggacccagaggttctttgagtcctttggggatctgtccactcctgatgctgttatgggcaaccctaaggtgaaggctcatggcaagaaagtgctcggtgcctttagtgatggcctggctcacctggacaacctcaagggcacctttgccacactgagtgagctgcactgtgacaagctgcacgtggatcctgagaacttcagggtgagtctatgggacgcttgatgttttctttccccttcttttctatggttaagttcatgtcataggaaggggataagtaacagggtacagtttagaatgggaaacagacgaatgattgcatcagtgtggaagtctcaggatcgttttagtttcttttatttgctgttcataacaattgttttcttttgtttaattcttgctttctttttttttcttctccgcaatttttactattatacttaatgccttaacattgtgtataacaaaaggaaatatctctgagatacattaagtaacttaaaaaaaaactttacacagtctgcctagtacattactatttggaatatatgtgtgcttatttgcatattcataatctccctactttattttcttttatttttaattgatacataatcattatacatatttatgggttaaagtgtaatgttttaatatgtgtacacatattgaccaaatcagggtaattttgcatttgtaattttaaaaaatgctttcttcttttaatatacttttttgtttatcttatttctaatactttccctaatctctttctttcagggcaataatgatacaatgtatcatgcctctttgcaccattctaaagaataacagtgataatttctgggttaaggcaatagcaatatctctgcatataaatatttctgcatataaattgtaactg

SEQ ID NO: 394 - DNA, 103 bp, Artificial Sequence
  Synthetic:  Template Construct 2
actgtgttcactagcaacctcaaacagacaccatggtgcatctgactcctggggagaagtctgccgttactgccctgtggggcaaggtgaacgtggatgaagt

SEQ ID NO: 395 - DNA, 59 bp, Artificial Sequence
  Synthetic:  HBB-6 donor 1
ctcctgaggagaagtctgccgttactgccctgtggggcaagggtgaacgtggatgaagt

SEQ ID NO: 396 - DNA, 58 bp, Artificial Sequence
  Synthetic:  HBB-6 donor 2
ctcctgaggagaagtctgccgttactgccctgtggggcaagatgaacgtggatgaagt

SEQ ID NO: 397 - RNA, 20 nt, Artificial Sequence
  Synthetic:  Oligonucleotide HBB-15
aaggugaacguggaugaagu

SEQ ID NO: 398 - RNA, 20 nt, Artificial Sequence
  Synthetic:  Oligonucleotide HBB-8
guaacggcagacuucuccuc

SEQ ID NO: 399 - RNA, 20 nt, Artificial Sequence
  Synthetic:  Oligonucleotide PDCD1-108
gucugggcggugcuacaacu

SEQ ID NO: 400 - RNA, 20 nt, Artificial Sequence
  Synthetic:  Oligonucleotide HBB-6
cguuacugcccuguggggca

SEQ ID NO: 401 - DNA, 19 bp, Artificial Sequence
  Synthetic:  T7 promoter
taatacgactcactatagg

SEQ ID NO: 402 - DNA, 18 bp, Artificial Sequence
  Synthetic:  5 end of the S. pyogenes tracr sequence
gttttagagctagaaata

SEQ ID NO: 403 - DNA, 37 bp, Artificial Sequence
  Synthetic:  3 anti-sense oligonucleotide
aaaagcaccgactcggtgccactttttcaagttgata

SEQ ID NO: 404 - DNA, 20 bp, Artificial Sequence
  Synthetic:  HBB_8 gRNA target region DNA template
gtaacggcagacttctcctc

SEQ ID NO: 405 - DNA, 65 bp, Artificial Sequence
  Synthetic:  5 sense primer
caccgctagctaatacgactcactatagtaacggcagacttctcctcgttttagagctagaaata

SEQ ID NO: 406 - DNA, 20 bp, Artificial Sequence
  Synthetic:  HBB_15 gRNA target region DNA template
aaggtgaacgtggatgaagt

SEQ ID NO: 407 - DNA, 17 bp, Artificial Sequence
  Synthetic:  modified T7 promoter sequence
taatacgactcactata

SEQ ID NO: 408 - DNA, 65 bp, Artificial Sequence
  Synthetic:  S. pyogenes CCR5_U43
caccgctagctaatacgactcactatagctgccgcccagtgggacttgttttagagctagaaata

SEQ ID NO: 409 - DNA, 67 bp, Artificial Sequence
  Synthetic:  S. pyogenes CCR5_U43 +GG
caccgctagctaatacgactcactatagggctgccgcccagtgggacttgttttagagctagaaata

SEQ ID NO: 410 - DNA, 67 bp, Artificial Sequence
  Synthetic:  S. aureus CXCR4-836
caccgctagctaatacgactcactatagctccaaggaaagcatagaggagttttagtactctggaaa

SEQ ID NO: 411 - DNA, 69 bp, Artificial Sequence
  Synthetic:  S. aureus CXCR4-836 + GG
caccgctagctaatacgactcactatagggctccaaggaaagcatagaggagttttagtactctggaaa

SEQ ID NO: 412 - DNA, 65 bp, Artificial Sequence
  Synthetic:  S. pyogenes AAVS1_1
caccgctagctaatacgactcactatagtcccctccaccccacagtggttttagagctagaaata

SEQ ID NO: 413 - DNA, 67 bp, Artificial Sequence
  Synthetic:  S. pyogenes AAVS1_1  +GG
caccgctagctaatacgactcactatagggtcccctccaccccacagtggttttagagctagaaata

SEQ ID NO: 414 - DNA, 20 bp, Artificial Sequence
  Synthetic:  HBB_8_sickle gRNA target region DNA template
gtaacggcagacttctccac

SEQ ID NO: 415 - DNA, 3159 bp, Staphylococcus aureus
  misc_feature (1)..(3159): Additional Codon optimized wild type sa Cas9 sequence
atgaagcggaactacatcctgggcctggacatcggcatcaccagcgtgggctacggcatcatcgactacgagacacgggacgtgatcgatgccggcgtgcggctgttcaaagaggccaacgtggaaaacaacgagggcaggcggagcaagagaggcgccagaaggctgaagcggcggaggcggcatagaatccagagagtgaagaagctgctgttcgactacaacctgctgaccgaccacagcgagctgagcggcatcaacccctacgaggccagagtgaagggcctgagccagaagctgagcgaggaagagttctctgccgccctgctgcacctggccaagagaagaggcgtgcacaacgtgaacgaggtggaagaggacaccggcaacgagctgtccaccaaagagcagatcagccggaacagcaaggccctggaagagaaatacgtggccgaactgcagctggaacggctgaagaaagacggcgaagtgcggggcagcatcaacagattcaagaccagcgactacgtgaaagaagccaaacagctgctgaaggtgcagaaggcctaccaccagctggaccagagcttcatcgacacctacatcgacctgctggaaacccggcggacctactatgagggacctggcgagggcagccccttcggctggaaggacatcaaagaatggtacgagatgctgatgggccactgcacctacttccccgaggaactgcggagcgtgaagtacgcctacaacgccgacctgtacaacgccctgaacgacctgaacaatctcgtgatcaccagggacgagaacgagaagctggaatattacgagaagttccagatcatcgagaacgtgttcaagcagaagaagaagcccaccctgaagcagatcgccaaagaaatcctcgtgaacgaagaggatattaagggctacagagtgaccagcaccggcaagcccgagttcaccaacctgaaggtgtaccacgacatcaaggacattaccgcccggaaagagattattgagaacgccgagctgctggatcagattgccaagatcctgaccatctaccagagcagcgaggacatccaggaagaactgaccaatctgaactccgagctgacccaggaagagatcgagcagatctctaatctgaagggctataccggcacccacaacctgagcctgaaggccatcaacctgatcctggacgagctgtggcacaccaacgacaaccagatcgctatcttcaaccggctgaagctggtgcccaagaaggtggacctgtcccagcagaaagagatccccaccaccctggtggacgacttcatcctgagccccgtcgtgaagagaagcttcatccagagcatcaaagtgatcaacgccatcatcaagaagtacggcctgcccaacgacatcattatcgagctggcccgcgagaagaactccaaggacgcccagaaaatgatcaacgagatgcagaagcggaaccggcagaccaacgagcggatcgaggaaatcatccggaccaccggcaaagagaacgccaagtacctgatcgagaagatcaagctgcacgacatgcaggaaggcaagtgcctgtacagcctggaagccatccctctggaagatctgctgaacaaccccttcaactatgaggtggaccacatcatccccagaagcgtgtccttcgacaacagcttcaacaacaaggtgctcgtgaagcaggaagaaaacagcaagaagggcaaccggaccccattccagtacctgagcagcagcgacagcaagatcagctacgaaaccttcaagaagcacatcctgaatctggccaagggcaagggcagaatcagcaagaccaagaaagagtatctgctggaagaacgggacatcaacaggttctccgtgcagaaagacttcatcaaccggaacctggtggataccagatacgccaccagaggcctgatgaacctgctgcggagctacttcagagtgaacaacctggacgtgaaagtgaagtccatcaatggcggcttcaccagctttctgcggcggaagtggaagtttaagaaagagcggaacaaggggtacaagcaccacgccgaggacgccctgatcattgccaacgccgatttcatcttcaaagagtggaagaaactggacaaggccaaaaaagtgatggaaaaccagatgttcgaggaaaagcaggccgagagcatgcccgagatcgaaaccgagcaggagtacaaagagatcttcatcaccccccaccagatcaagcacattaaggacttcaaggactacaagtacagccaccgggtggacaagaagcctaatagagagctgattaacgacaccctgtactccacccggaaggacgacaagggcaacaccctgatcgtgaacaatctgaacggcctgtacgacaaggacaatgacaagctgaaaaagctgatcaacaagagccccgaaaagctgctgatgtaccaccacgacccccagacctaccagaaactgaagctgattatggaacagtacggcgacgagaagaatcccctgtacaagtactacgaggaaaccgggaactacctgaccaagtactccaaaaaggacaacggccccgtgatcaagaagattaagtattacggcaacaaactgaacgcccatctggacatcaccgacgactaccccaacagcagaaacaaggtcgtgaagctgtccctgaagccctacagattcgacgtgtacctggacaatggcgtgtacaagttcgtgaccgtgaagaatctggatgtgatcaaaaaagaaaactactacgaagtgaatagcaagtgctatgaggaagctaagaagctgaagaagatcagcaaccaggccgagtttatcgcctccttctacaacaacgatctgatcaagatcaacggcgagctgtatagagtgatcggcgtgaacaacgacctgctgaaccggatcgaagtgaacatgatcgacatcacctaccgcgagtacctggaaaacatgaacgacaagaggccccccaggatcattaagacaatcgcctccaagacccagagcattaagaagtacagcacagacattctgggcaacctgtatgaagtgaaatctaagaagcaccctcagatcatcaaaaagggc

SEQ ID NO: 416 - DNA, 3159 bp, Staphylococcus aureus
  misc_feature (1)..(3159): Additional Codon optimized wildtype sa Cas9 sequence
atgaagcgcaactacatcctcggactggacatcggcattacctccgtgggatacggcatcatcgattacgaaactagggatgtgatcgacgctggagtcaggctgttcaaagaggcgaacgtggagaacaacgaggggcggcgctcaaagaggggggcccgccggctgaagcgccgccgcagacatagaatccagcgcgtgaagaagctgctgttcgactacaaccttctgaccgaccactccgaactttccggcatcaacccatatgaggctagagtgaagggattgtcccaaaagctgtccgaggaagagttctccgccgcgttgctccacctcgccaagcgcaggggagtgcacaatgtgaacgaagtggaagaagataccggaaacgagctgtccaccaaggagcagatcagccggaactccaaggccctggaagagaaatacgtggcggaactgcaactggagcggctgaagaaagacggagaagtgcgcggctcgatcaaccgcttcaagacctcggactacgtgaaggaggccaagcagctcctgaaagtgcaaaaggcctatcaccaacttgaccagtcctttatcgatacctacatcgatctgctcgagactcggcggacttactacgagggtccaggggagggctccccatttggttggaaggatattaaggagtggtacgaaatgctgatgggacactgcacatacttccctgaggagctgcggagcgtgaaatacgcatacaacgcagacctgtacaacgcgctgaacgacctgaacaatctcgtgatcacccgggacgagaacgaaaagctcgagtattacgaaaagttccagattattgagaacgtgttcaaacagaagaagaagccgacactgaagcagattgccaaggaaatcctcgtgaacgaagaggacatcaagggctatcgagtgacctcaacgggaaagccggagttcaccaatctgaaggtctaccacgacatcaaagacattaccgcccggaaggagatcattgagaacgcggagctgttggaccagattgcgaagattctgaccatctaccaatcctccgaggatattcaggaagaactcaccaacctcaacagcgaactgacccaggaggagatagagcaaatctccaacctgaagggctacaccggaactcataacctgagcctgaaggccatcaacttgatcctggacgagctgtggcacaccaacgataaccagatcgctattttcaatcggctgaagctggtccccaagaaagtggacctctcacaacaaaaggagatccctactacccttgtggacgatttcattctgtcccccgtggtcaagagaagcttcatacagtcaatcaaagtgatcaatgccattatcaagaaatacggtctgcccaacgacattatcattgagctcgcccgcgagaagaactcgaaggacgcccagaagatgattaacgaaatgcagaagaggaaccgacagactaacgaacggatcgaagaaatcatccggaccaccgggaaggaaaacgcgaagtacctgatcgaaaagatcaagctccatgacatgcaggaaggaaagtgtctgtactcgctggaggccattccgctggaggacttgctgaacaacccttttaactacgaagtggatcatatcattccgaggagcgtgtcattcgacaattccttcaacaacaaggtcctcgtgaagcaggaggaaaactcgaagaagggaaaccgcacgccgttccagtacctgagcagcagcgactccaagatttcctacgaaaccttcaagaagcacatcctcaacctggcaaaggggaagggtcgcatctccaagaccaagaaggaatatctgctggaagaaagagacatcaacagattctccgtgcaaaaggacttcatcaaccgcaacctcgtggatactagatacgctactcggggtctgatgaacctcctgagaagctactttagagtgaacaatctggacgtgaaggtcaagtcgattaacggaggtttcacctccttcctgcggcgcaagtggaagttcaagaaggaacggaacaagggctacaagcaccacgccgaggacgccctgatcattgccaacgccgacttcatcttcaaagaatggaagaaacttgacaaggctaagaaggtcatggaaaaccagatgttcgaagaaaagcaggccgagtctatgcctgaaatcgagactgaacaggagtacaaggaaatctttattacgccacaccagatcaaacacatcaaggatttcaaggattacaagtactcacatcgcgtggacaaaaagccgaacagggaactgatcaacgacaccctctactccacccggaaggatgacaaagggaataccctcatcgtcaacaaccttaacggcctgtacgacaaggacaacgataagctgaagaagctcattaacaagtcgcccgaaaagttgctgatgtaccaccacgaccctcagacttaccagaagctcaagctgatcatggagcagtatggggacgagaaaaacccgttgtacaagtactacgaagaaactgggaattatctgactaagtactccaagaaagataacggccccgtgattaagaagattaagtactacggcaacaagctgaacgcccatctggacatcaccgatgactaccctaattcccgcaacaaggtcgtcaagctgagcctcaagccctaccggtttgatgtgtaccttgacaatggagtgtacaagttcgtgactgtgaagaaccttgacgtgatcaagaaggagaactactacgaagtcaactccaagtgctacgaggaagcaaagaagttgaagaagatctcgaaccaggccgagttcattgcctccttctataacaacgacctgattaagatcaacggcgaactgtaccgcgtcattggcgtgaacaacgatctcctgaaccgcatcgaagtgaacatgatcgacatcacttaccgggaatacctggagaatatgaacgacaagcgcccgccccggatcattaagactatcgcctcaaagacccagtcgatcaagaagtacagcaccgacatcctgggcaacctgtacgaggtcaaatcgaagaagcacccccagatcatcaagaaggga

SEQ ID NO: 417 - DNA, 3159 bp, Staphylococcus aureus
  misc_feature (1)..(3159): Codon optimized SaCas9 nickase D10A
atgaaaaggaactacattctggggctggccatcgggattacaagcgtggggtatgggattattgactatgaaacaagggacgtgatcgacgcaggcgtcagactgttcaaggaggccaacgtggaaaacaatgagggacggagaagcaagaggggagccaggcgcctgaaacgacggagaaggcacagaatccagagggtgaagaaactgctgttcgattacaacctgctgaccgaccattctgagctgagtggaattaatccttatgaagccagggtgaaaggcctgagtcagaagctgtcagaggaagagttttccgcagctctgctgcacctggctaagcgccgaggagtgcataacgtcaatgaggtggaagaggacaccggcaacgagctgtctacaaaggaacagatctcacgcaatagcaaagctctggaagagaagtatgtcgcagagctgcagctggaacggctgaagaaagatggcgaggtgagagggtcaattaataggttcaagacaagcgactacgtcaaagaagccaagcagctgctgaaagtgcagaaggcttaccaccagctggatcagagcttcatcgatacttatatcgacctgctggagactcggagaacctactatgagggaccaggagaagggagccccttcggatggaaagacatcaaggaatggtacgagatgctgatgggacattgcacctattttccagaagagctgagaagcgtcaagtacgcttataacgcagatctgtacaacgccctgaatgacctgaacaacctggtcatcaccagggatgaaaacgagaaactggaatactatgagaagttccagatcatcgaaaacgtgtttaagcagaagaaaaagcctacactgaaacagattgctaaggagatcctggtcaacgaagaggacatcaagggctaccgggtgacaagcactggaaaaccagagttcaccaatctgaaagtgtatcacgatattaaggacatcacagcacggaaagaaatcattgagaacgccgaactgctggatcagattgctaagatcctgactatctaccagagctccgaggacatccaggaagagctgactaacctgaacagcgagctgacccaggaagagatcgaacagattagtaatctgaaggggtacaccggaacacacaacctgtccctgaaagctatcaatctgattctggatgagctgtggcatacaaacgacaatcagattgcaatctttaaccggctgaagctggtcccaaaaaaggtggacctgagtcagcagaaagagatcccaaccacactggtggacgatttcattctgtcacccgtggtcaagcggagcttcatccagagcatcaaagtgatcaacgccatcatcaagaagtacggcctgcccaatgatatcattatcgagctggctagggagaagaacagcaaggacgcacagaagatgatcaatgagatgcagaaacgaaaccggcagaccaatgaacgcattgaagagattatccgaactaccgggaaagagaacgcaaagtacctgattgaaaaaatcaagctgcacgatatgcaggagggaaagtgtctgtattctctggaggccatccccctggaggacctgctgaacaatccattcaactacgaggtcgatcatattatccccagaagcgtgtccttcgacaattcctttaacaacaaggtgctggtcaagcaggaagagaactctaaaaagggcaataggactcctttccagtacctgtctagttcagattccaagatctcttacgaaacctttaaaaagcacattctgaatctggccaaaggaaagggccgcatcagcaagaccaaaaaggagtacctgctggaagagcgggacatcaacagattctccgtccagaaggattttattaaccggaatctggtggacacaagatacgctactcgcggcctgatgaatctgctgcgatcctatttccgggtgaacaatctggatgtgaaagtcaagtccatcaacggcgggttcacatcttttctgaggcgcaaatggaagtttaaaaaggagcgcaacaaagggtacaagcaccatgccgaagatgctctgattatcgcaaatgccgacttcatctttaaggagtggaaaaagctggacaaagccaagaaagtgatggagaaccagatgttcgaagagaagcaggccgaatctatgcccgaaatcgagacagaacaggagtacaaggagattttcatcactcctcaccagatcaagcatatcaaggatttcaaggactacaagtactctcaccgggtggataaaaagcccaacagagagctgatcaatgacaccctgtatagtacaagaaaagacgataaggggaataccctgattgtgaacaatctgaacggactgtacgacaaagataatgacaagctgaaaaagctgatcaacaaaagtcccgagaagctgctgatgtaccaccatgatcctcagacatatcagaaactgaagctgattatggagcagtacggcgacgagaagaacccactgtataagtactatgaagagactgggaactacctgaccaagtatagcaaaaaggataatggccccgtgatcaagaagatcaagtactatgggaacaagctgaatgcccatctggacatcacagacgattaccctaacagtcgcaacaaggtggtcaagctgtcactgaagccatacagattcgatgtctatctggacaacggcgtgtataaatttgtgactgtcaagaatctggatgtcatcaaaaaggagaactactatgaagtgaatagcaagtgctacgaagaggctaaaaagctgaaaaagattagcaaccaggcagagttcatcgcctccttttacaacaacgacctgattaagatcaatggcgaactgtatagggtcatcggggtgaacaatgatctgctgaaccgcattgaagtgaatatgattgacatcacttaccgagagtatctggaaaacatgaatgataagcgcccccctcgaattatcaaaacaattgcctctaagactcagagtatcaaaaagtactcaaccgacattctgggaaacctgtatgaggtgaagagcaaaaagcaccctcagattatcaaaaagggc

SEQ ID NO: 418 - DNA, 3159 bp, Staphylococcus aureus
  misc_feature (1)..(3159): Codon optimized SaCas9 nickase N580A
atgaaaaggaactacattctggggctggacatcgggattacaagcgtggggtatgggattattgactatgaaacaagggacgtgatcgacgcaggcgtcagactgttcaaggaggccaacgtggaaaacaatgagggacggagaagcaagaggggagccaggcgcctgaaacgacggagaaggcacagaatccagagggtgaagaaactgctgttcgattacaacctgctgaccgaccattctgagctgagtggaattaatccttatgaagccagggtgaaaggcctgagtcagaagctgtcagaggaagagttttccgcagctctgctgcacctggctaagcgccgaggagtgcataacgtcaatgaggtggaagaggacaccggcaacgagctgtctacaaaggaacagatctcacgcaatagcaaagctctggaagagaagtatgtcgcagagctgcagctggaacggctgaagaaagatggcgaggtgagagggtcaattaataggttcaagacaagcgactacgtcaaagaagccaagcagctgctgaaagtgcagaaggcttaccaccagctggatcagagcttcatcgatacttatatcgacctgctggagactcggagaacctactatgagggaccaggagaagggagccccttcggatggaaagacatcaaggaatggtacgagatgctgatgggacattgcacctattttccagaagagctgagaagcgtcaagtacgcttataacgcagatctgtacaacgccctgaatgacctgaacaacctggtcatcaccagggatgaaaacgagaaactggaatactatgagaagttccagatcatcgaaaacgtgtttaagcagaagaaaaagcctacactgaaacagattgctaaggagatcctggtcaacgaagaggacatcaagggctaccgggtgacaagcactggaaaaccagagttcaccaatctgaaagtgtatcacgatattaaggacatcacagcacggaaagaaatcattgagaacgccgaactgctggatcagattgctaagatcctgactatctaccagagctccgaggacatccaggaagagctgactaacctgaacagcgagctgacccaggaagagatcgaacagattagtaatctgaaggggtacaccggaacacacaacctgtccctgaaagctatcaatctgattctggatgagctgtggcatacaaacgacaatcagattgcaatctttaaccggctgaagctggtcccaaaaaaggtggacctgagtcagcagaaagagatcccaaccacactggtggacgatttcattctgtcacccgtggtcaagcggagcttcatccagagcatcaaagtgatcaacgccatcatcaagaagtacggcctgcccaatgatatcattatcgagctggctagggagaagaacagcaaggacgcacagaagatgatcaatgagatgcagaaacgaaaccggcagaccaatgaacgcattgaagagattatccgaactaccgggaaagagaacgcaaagtacctgattgaaaaaatcaagctgcacgatatgcaggagggaaagtgtctgtattctctggaggccatccccctggaggacctgctgaacaatccattcaactacgaggtcgatcatattatccccagaagcgtgtccttcgacaattcctttaacaacaaggtgctggtcaagcaggaagaggcctctaaaaagggcaataggactcctttccagtacctgtctagttcagattccaagatctcttacgaaacctttaaaaagcacattctgaatctggccaaaggaaagggccgcatcagcaagaccaaaaaggagtacctgctggaagagcgggacatcaacagattctccgtccagaaggattttattaaccggaatctggtggacacaagatacgctactcgcggcctgatgaatctgctgcgatcctatttccgggtgaacaatctggatgtgaaagtcaagtccatcaacggcgggttcacatcttttctgaggcgcaaatggaagtttaaaaaggagcgcaacaaagggtacaagcaccatgccgaagatgctctgattatcgcaaatgccgacttcatctttaaggagtggaaaaagctggacaaagccaagaaagtgatggagaaccagatgttcgaagagaagcaggccgaatctatgcccgaaatcgagacagaacaggagtacaaggagattttcatcactcctcaccagatcaagcatatcaaggatttcaaggactacaagtactctcaccgggtggataaaaagcccaacagagagctgatcaatgacaccctgtatagtacaagaaaagacgataaggggaataccctgattgtgaacaatctgaacggactgtacgacaaagataatgacaagctgaaaaagctgatcaacaaaagtcccgagaagctgctgatgtaccaccatgatcctcagacatatcagaaactgaagctgattatggagcagtacggcgacgagaagaacccactgtataagtactatgaagagactgggaactacctgaccaagtatagcaaaaaggataatggccccgtgatcaagaagatcaagtactatgggaacaagctgaatgcccatctggacatcacagacgattaccctaacagtcgcaacaaggtggtcaagctgtcactgaagccatacagattcgatgtctatctggacaacggcgtgtataaatttgtgactgtcaagaatctggatgtcatcaaaaaggagaactactatgaagtgaatagcaagtgctacgaagaggctaaaaagctgaaaaagattagcaaccaggcagagttcatcgcctccttttacaacaacgacctgattaagatcaatggcgaactgtatagggtcatcggggtgaacaatgatctgctgaaccgcattgaagtgaatatgattgacatcacttaccgagagtatctggaaaacatgaatgataagcgcccccctcgaattatcaaaacaattgcctctaagactcagagtatcaaaaagtactcaaccgacattctgggaaacctgtatgaggtgaagagcaaaaagcaccctcagattatcaaaaagggc

SEQ ID NO: 419 - DNA, 106 bp, Homo sapiens
gatatccagaaccctgaccctgccgtgtaccagctgagagactctaaatccagtgacaagtctgtctgcctattcaccgattttgattctcaaacaaatgtgtcac

SEQ ID NO: 420 - DNA, 101 bp, Homo sapiens
ccagaaccctgaccctgccgtgtaccagctgagagactctaaatccagtgacaagtctgtctgcctattcaccgattttgattctcaaacaaatgtgtcac

SEQ ID NO: 421 - DNA, 10 bp, Homo sapiens
gatgtgtcac

SEQ ID NO: 422 - DNA, 69 bp, Homo sapiens
gatatccagaaccctgaccctgccgtgtaccagctgagattttttttgattctcaaacaaatgtgtcac

SEQ ID NO: 423 - DNA, 86 bp, Homo sapiens
ccagaaccctgaccctgccgtgtaccagctgagagactagtctgtctgcctattcaccgattttgattctcaaacaaatgtgtcac

SEQ ID NO: 424 - DNA, 57 bp, Homo sapiens
ccagaaccctgaccctgccgtgtaccagctgagaggattctcaaacaaatgtgtcac

SEQ ID NO: 425 - DNA, 22 bp, Homo sapiens
ccagaaccctgaaatgtgtcac

SEQ ID NO: 426 - DNA, 96 bp, Homo sapiens
agaaccctgaccctgccgtgtaccagctgagagactctaaatccagtaagtctgtctgcctattcaccgattttgattctcaaacaaatgtgtcac

SEQ ID NO: 427 - DNA, 93 bp, Homo sapiens
ccagaaccctgaccctgccgtgtaccagctgagagactctaaacaagtctgtctgcctattcaccgattttgattctcaaacaaatgtgtcac

SEQ ID NO: 428 - DNA, 69 bp, Homo sapiens
ccagaaccctgaccctgccgtgtaccagctgcctattcaccgattttgattctcaaacaaatgtgtcac

SEQ ID NO: 429 - DNA, 96 bp, Homo sapiens
aaccctgaccctgccgtgtaccagctgagagactctaaatccagtgcaagtctgtctgcctattcaccgattttgattctcaaacaaatgtgtcac

SEQ ID NO: 430 - DNA, 96 bp, Homo sapiens
aaccctgaccctgccgtgtaccagctgagagactctaaatccagtgaaagtctgtctgcctattcaccgattttgattctcaaacaaatgtgtcac

SEQ ID NO: 431 - DNA, 101 bp, Homo sapiens
cagaaccctgaccctgccgtgtaccagctgagagactctaaatccagtgaacaagtctgtctgcctattcaccgattttgattctcaaacaaatgtgtcac

SEQ ID NO: 432 - DNA, 96 bp, Homo sapiens
agaaccctgaccctgccgtgtaccagctgagagactctaaatccagcaagtctgtctgcctattcaccgattttgattctcaaacaaatgtgtcac

SEQ ID NO: 433 - DNA, 94 bp, Homo sapiens
ccagaaccctgaccctgccgtgtaccagctgagagactctaaatcaagtctgtctgcctattcaccgattttgattctcaaacaaatgtgtcac

SEQ ID NO: 434 - DNA, 94 bp, Homo sapiens
ccagaaccctgaccctgccgtgtaccagctgagagactctaaatccagtctgtctgcctattcaccgattttgattctcaaacaaatgtgtcac

SEQ ID NO: 435 - DNA, 68 bp, Homo sapiens
ccagaaccctgaccctgccgtgtaccagctgagagactccgattttgattctcaaacaaatgtgtcac

SEQ ID NO: 436 - DNA, 97 bp, Homo sapiens
agaaccctgaccctgccgtgtaccagctgagagactctaaatccagtgaagtctgtctgcctattcaccgattttgattctcaaacaaatgtgtcac

SEQ ID NO: 437 - DNA, 67 bp, Homo sapiens
ccagaaccctgaccctgccgtgtaccagctgagagactctattttgattctcaaacaaatgtgtcac

SEQ ID NO: 438 - DNA, 97 bp, Homo sapiens
ccagaaccctgaccctgccgtgtaccagctgagagactctaaatccacaagtctgtctgcctattcaccgattttgattctcaaacaaatgtgtcac

SEQ ID NO: 439 - DNA, 73 bp, Homo sapiens
ccagaaccctgaccctgccgtgtaccagctgtctgcctattcaccgattttgattctcaaacaaatgtgtcac

SEQ ID NO: 440 - DNA, 89 bp, Homo sapiens
ccagaaccctgaccctgccgtgtaccagctgagagactctaagtctgtctgcctattcaccgattttgattctcaaacaaatgtgtcac

SEQ ID NO: 441 - DNA, 96 bp, Homo sapiens
gaaccctgaccctgccgtgtaccagctgagagactctaaatccaaacaagtctgtctgcctattcaccgattttgattctcaaacaaatgtgtcac

SEQ ID NO: 442 - DNA, 94 bp, Homo sapiens
agaaccctgaccctgccgtgtaccagctgagagactctaaatccagtgtctgtctgcctattcaccgattttgattctcaaacaaatgtgtcac

SEQ ID NO: 443 - DNA, 51 bp, Homo sapiens
ccaagtctgtctgcctattcaccgattttgattctcaaacaaatgtgtcac

SEQ ID NO: 444 - DNA, 101 bp, Homo sapiens; identical to SEQ ID NO: 420

SEQ ID NO: 445 - DNA, 102 bp, Homo sapiens
cgggctctcggagaatgacgagtggacccaggatagggccaaacctgtcacccagatcgtcagcgccgaggcctggggtagagcaggtgagtggggcctggg

SEQ ID NO: 446 - DNA, 94 bp, Homo sapiens
cggagaatgacgagtggacccaggatagggccaaacctgtcacccagatcgtcagcgccgaggcctggggtagagcaggtgagtggggcctggg

SEQ ID NO: 447 - DNA, 95 bp, Homo sapiens
cggagaatgacgagtggacccaggatagggccaaacccgtcaacccagatcgtcagcgccgaggcctggggtagagcaggtgagtggggcctggg

SEQ ID NO: 448 - DNA, 95 bp, Homo sapiens
cggagaatgacgagtggacccaggatagggccaaacctgtcaacccagatcgtcagcgccgaggcctggggtagagcaggtgagtggggcctggg

SEQ ID NO: 449 - DNA, 95 bp, Homo sapiens
cggagaatgacgagtggacccaggatagggccaaacctgtctacccagatcgtcagcgccgaggcctggggtagagcaggtgagtggggcctggg

SEQ ID NO: 450 - DNA, 86 bp, Homo sapiens
cggagaatgacgagtggacccaggatagggccaaaccagatcgtcagcgccgaggcctggggtagagcaggtgagtggggcctggg

SEQ ID NO: 451 - DNA, 81 bp, Homo sapiens
cggagaatgacgagtggacccaggatagggccagatcgtcagcgccgaggcctggggtagagcaggtgagtggggcctggg

SEQ ID NO: 452 - DNA, 61 bp, Homo sapiens
cggagaatgacgagtggacccaggatagggcctggggtagagcaggtgagtggggcctggg

SEQ ID NO: 453 - DNA, 82 bp, Homo sapiens
cggagaatgacgagtggacccaggatagggcccagatcgtcagcgccgaggcctggggtagagcaggtgagtggggcctggg

SEQ ID NO: 454 - DNA, 82 bp, Homo sapiens
cggagaatgacgagtggacccaggatagggccaaacccgtcagcgccgaggcctggggtagagcaggtgagtggggcctggg

SEQ ID NO: 455 - DNA, 87 bp, Homo sapiens
cggagaatgacgagtggacccaggatagggccaaacccagatcgtcagcgccgaggcctggggtagagcaggtgagtggggcctggg

SEQ ID NO: 456 - DNA, 93 bp, Homo sapiens
cggagaatgacgagtggacccaggatagggccaaacctgtccccagatcgtcagcgccgaggcctggggtagagcaggtgagtggggcctggg

SEQ ID NO: 457 - DNA, 67 bp, Homo sapiens
cggagaatgacgagtggacccaggatagggccgaggcctggggtagagcaggtgagtggggcctggg

SEQ ID NO: 458 - DNA, 71 bp, Homo sapiens
cggagaatgacgagtggacccaggatcgtcagcgccgaggcctggggtagagcaggtgagtggggcctggg

SEQ ID NO: 459 - DNA, 70 bp, Homo sapiens
cggagaatgacgagtggacccagatcgtcagcgccgaggcctggggtagagcaggtgagtggggcctggg

SEQ ID NO: 460 - DNA, 82 bp, Homo sapiens
cggagaatgacgagtggacccaggataggacccagatcgtcagcgccgaggcctggggtagagcaggtgagtggggcctggg

SEQ ID NO: 461 - DNA, 85 bp, Homo sapiens
cggagaatgacgagtggacccaggatagggccacccagatcgtcagcgccgaggcctggggtagagcaggtgagtggggcctggg

SEQ ID NO: 462 - DNA, 103 bp, Homo sapiens
ctgctccaggcatgcagatcccacaggcgccctggccagtcgtctgggcggtgctacaactgggctggcggccaggatggttcttaggtaggtggggtcggcg

SEQ ID NO: 463 - DNA, 97 bp, Homo sapiens
caggcatgcagatcccacaggcgccctggccagtcgtctgggcggtgctacaactgggctggcggccaggatggttcttaggtaggtggggtcggcg

SEQ ID NO: 464 - DNA, 82 bp, Homo sapiens
caggcatgcagatcccacaggcgccctggccagtcgtcctgggctggcggccaggatggttcttaggtgggtggggtcggcg

SEQ ID NO: 465 - DNA, 76 bp, Homo sapiens
caggcatgcagatcccacaggcgccctggccagtcgtctggcggccaggatggttcttaggtgggtggggtcggcg

SEQ ID NO: 466 - DNA, 93 bp, Homo sapiens
ggcatgcagatcccacaggcgccctggccagtcgtctgggcggtgctaactgggctggcggccaggatggttcttaggtaggtggggtcggcg

SEQ ID NO: 467 - DNA, 73 bp, Homo sapiens
caggcatgcagatcccacaggcgccctggccagtctggcggccaggatggttcttaggtaggtggggtcggcg

SEQ ID NO: 468 - DNA, 90 bp, Homo sapiens
caggcatgcagatcccacaggcgccctggccagtcgtctgggcgaactgggctggcggccaggatggttcttaggtaggtggggtcggcg

SEQ ID NO: 469 - DNA, 64 bp, Homo sapiens
caggcatgcagatcccacaggcgccctggcggccaggatggttcttaggtaggtggggtcggcg

SEQ ID NO: 470 - DNA, 61 bp, Homo sapiens
caggcatgcagatcccacagggctggcggccaggatggttcttaggtaggtggggtcggcg

SEQ ID NO: 471 - DNA, 93 bp, Homo sapiens
caggcatgcagatcccacaggcgccctggccagtcgtctgggcggtgaactgggctggcggccaggatggttcttaggtaggtggggtcggcg

SEQ ID NO: 472 - DNA, 94 bp, Homo sapiens
caggcatgcagatcccacaggcgccctggccagtcgtctgggcggtgctactgggctggcggccaggatggttcttaggtaggtggggtcggcg

SEQ ID NO: 473 - DNA, 96 bp, Homo sapiens
caggcatgcagatcccacaggcgccctggccagtcgtctgggcggtgctacactgggctggcggccaggatggttcttaggtaggtggggtcggcg

SEQ ID NO: 474 - DNA, 81 bp, Homo sapiens
caggcatgcagatcccacaggcgccctggccagtcgtctgggctggcggccaggatggttcttaggtaggtggggtcggcg

SEQ ID NO: 475 - DNA, 61 bp, Homo sapiens
caggcatgcagatcccacaggcgccctggccaggatggttcttaggtaggtggggtcggcg

SEQ ID NO: 476 - DNA, 58 bp, Homo sapiens
caggcatgcagatcccacaggcgccctggccagtcgtcttaggtaggtggggtcggcg

SEQ ID NO: 477 - DNA, 92 bp, Homo sapiens
caggcatgcagatcccacaggcgccctggccagtcgtctgggcggtgactgggctggcggccaggatggttcttaggtaggtggggtcggcg

SEQ ID NO: 478 - DNA, 78 bp, Homo sapiens
caggcatgcagatcccacaggcgccctggccagtcgtctgggctggccaggatggttcttaggtaggtggggtcggcg

SEQ ID NO: 479 - DNA, 103 bp, Homo sapiens; identical to SEQ ID NO: 462

SEQ ID NO: 480 - DNA, 69 bp, Homo sapiens
caggcatgcagatcccacaggcgccctgggctggcggccaggatggttcttaggtaggtggggtcggcg

SEQ ID NO: 481 - DNA, 85 bp, Homo sapiens
caggcatgcagatcccacaggcgccctggccagtcgtctgggcggtgctacagccaggatggttcttaggtaggtggggtcggcg

SEQ ID NO: 482 - DNA, 73 bp, Homo sapiens
caggcatgcagatcccacaggcgccctggcactgctggcggccaggatggttcttaggtaggtggggtcggcg

SEQ ID NO: 483 - DNA, 39 bp, Homo sapiens
ctggcggccaggatggttcttaggtaggtggggtcggcg

SEQ ID NO: 484 - DNA, 73 bp, Homo sapiens
caggcatgcagatcccacaggcgccctggccagtcgtctggccaggatggttcttaggtgggtggggtcggcg

SEQ ID NO: 485 - DNA, 36 bp, Homo sapiens
ctgctccaggcggttcttaggtaggtggggtcggcg

SEQ ID NO: 486 - DNA, 77 bp, Homo sapiens
caggcatgcagatcccacaggcgccctggccagtcgtctgggcggccaggatggttcttaggtgggtggggtcggcg

SEQ ID NO: 487 - DNA, 18 bp, Artificial Sequence
  Synthetic oligonucleotide: modified T7 promoter sequence 2
taatacgactcactatag

SEQ ID NO: 488 - DNA, 20 bp, Artificial Sequence
  Synthetic oligonucleotide: CCR5_U43 gRNA target region DNA template
gctgccgcccagtgggactt
